(19) United States
(12) Patent Application Publication
(10) Pub. No.: US 2016/0272997 A1
(43) Pub. Date: Sep. 22, 2016

(54) STEM CANKER TOLERANT SOYBEANS AND METHODS OF USE

(71) Applicant: PIONEER HI-BRED INTERNATIONAL, INC., Johnsoton, IA (US)

(72) Inventors: Carlos Da Rosa, Johnston, IA (US); Mark J. Hood, Johnston, IA (US); Luis C. Prado, Johnston, IA (US); Sally A. Santiago-Parton, Johnston, IA (US); Joshua M. Shendelman, Johnston, IA (US); Robert J. Suttner, Johnston, IA (US); John B. Woodward, Johnston, IA (US); Yanwen Xiong, Johnston, IA (US)

(73) Assignee: PIONEER HI-BRED INTERNATIONAL, INC., Johnston, IA (US)

(21) Appl. No.: 15/031,674

(22) PCT Filed: Oct. 23, 2014
(86) PCT No.: PCT/US14/61931

§ 371 Date: Apr. 22, 2016

Related U.S. Application Data
(60) Provisional application No. 61/895,702, filed on Oct. 25, 2013.

(51) Int. Cl. C12N 15/82; C12Q 1/68

(52) U.S. Cl. CPC C12N 15/8282; C12N 15/8274; C12N 15/8275; C12N 15/8277; C12N 15/8278; C12N 15/8273; C12N 15/8271; C12N 15/8279; C12N 15/8261; C12N 15/8247; C12N 15/8251; C12N 15/8286; C12N 15/8283; C12N 15/8285; C12Q 1/6895; C12Q 2600/156; C12Q 2600/158; C12Q 2600/13

(57) ABSTRACT

Soybean plants, germplasm and seed comprising at least one native locus conferring improved stem canker tolerance, molecular markers useful for identifying and, optionally, selecting soybean plants displaying tolerance, improved tolerance, or susceptibility to stem canker, and methods of their use are provided. Also provided are isolated polynucleotides, probes, kits, systems, and the like, useful for carrying out the methods described herein.

### REFERENCE TO SEQUENCE LISTING SUBMITTED ELECTRONICALLY

[0001] The official copy of the sequence listing is submitted electronically via EFS-Web as an ASCII formatted sequence listing with a file named “4374-WO-PCT_seqlist_ST25.txt” created on Oct. 10, 2013, and having a size of 573 kilobytes and is filed concurrently with the specification. The sequence listing contained in this ASCII formatted document is part of the specification and is herein incorporated by reference in its entirety.

### FIELD OF THE INVENTION

[0002] This invention relates to stem canker resistant soybean plants, molecular markers, and methods.

### BACKGROUND

[0003] Soybeans (Glycine max (L.) Merr.) are a major cash crop and investment commodity in North America and elsewhere. Soybean oil is one of the most widely used edible oils, and soybeans are used worldwide both in animal feed and in human food production. Additionally, soybean utilization is expanding to industrial, manufacturing, and pharmaceutical applications. Stem canker is a widely recognized fungal disease that can cause serious yield losses of up to about 50% in soybean. Stem canker has been divided into Northern stem canker and Southern stem canker based on two different pathogenic varieties of the fungus Diaporthe phaseolorum. Soybean varieties resistant to at least one variety of stem canker provide efficient and effective disease control and crop management options to provide the best possible combination of flexibility and economy.

[0004] There is need for methods and compositions to identify and/or select soybean plants and germplasm with improved tolerance to fungal pathogens, improved genetic markers for identifying plants possessing tolerance or susceptibility to fungal pathogens, including agents that cause stem canker such as Diaporthe phaseolorum var. meridionalis.

### SUMMARY

[0005] Soybean plants, germplasm and seed comprising at least one native locus conferring improved stem canker tolerance, molecular markers useful for identifying and, optionally, selecting soybean plants displaying tolerance, improved tolerance, or susceptibility to stem canker, and methods of their use are provided. Also provided are isolated polynucleotides, probes, kits, systems, and the like, useful for carrying out the methods described herein.

### BRIEF DESCRIPTION OF DRAWINGS

[0006] FIG. 1 summarizes the genetic positions of loci associated with tolerance to stem canker.

### SUMMARY OF THE SEQUENCES

[0007] SEQ ID NOs:1-786 comprise polynucleotide sequences of regions of the soybean genome, each capable of being used as a probe or primer, either alone or in combination, for the detection of a marker locus associated with stem canker tolerance in soybean, and/or encoding polypeptides which are also provided as SEQ ID NOs:787-799. In certain examples, Primer1 and Primer2 are used as allele specific primers and Probe1 and Probe2 are used as allele probes. The SEQ ID NOs provided in the “Region” column of the table below are each a genomic DNA region encompassing the respective marker locus. In some examples, the primers and/or probes detect the polymorphism on based on a polynucleotide complementary to the genomic region provided here. It is to be understood that the sequences provided are sufficient for one of skill in the art to detect a locus associated with stem canker tolerance in soybean regardless of the orientation (forward, or reverse) of the strand used for detection.

TABLE 1

| | | SEQ ID NO | | | | |
|---|---|---|---|---|---|---|
| Locus | Allele (R/S) | Region | Probe1 | Probe2 | Primer1 | Primer2 |
| Gm14: 1706695 | A/T | 1 | — | — | — | — |
| Gm14: 1723656 | C/T | 2 | — | — | — | — |
| Gm14: 1723831 | G/A | 3 | — | — | — | — |
| Gm14: 1724319 | G/A | 4 | — | — | — | — |
| Gm14: 1738483 | G/A | 5 | — | — | — | — |
| Gm14: 1739929 | A/G | 6 | — | — | — | — |
| Gm14: 1850843 | A/G | 7 | — | — | — | — |
| Gm14: 1853044 | T/G | 8 | — | — | — | — |
| Gm14: 1863371 | G/A | 9 | — | — | — | — |
| Gm14: 1863436 | G/A | 10 | — | — | — | — |
| Gm14: 1863868 | C/T | 11 | — | — | — | — |
| Gm14: 1914305 | C/T | 12 | — | — | — | — |
| Gm14: 1936105 | T/C | 13 | — | — | — | — |
| Gm14: 1939210 | A/G | 14 | — | — | — | — |
| Gm14: 1940046 | C/T | 15 | — | — | — | — |
| Gm14: 1942461 | C/T | 16 | — | — | — | — |
| Gm14: 1942681 | T/C | 17 | — | — | — | — |
| Gm14: 1700735 | T/C | 18 | — | — | — | — |
| Gm14: 1702258 | G/A | 19 | — | — | — | — |
| Gm14: 1715352 | C/T | 20 | — | — | — | — |
| Gm14: 1718565 | A/C | 21 | — | — | — | — |
| Gm14: 1722078 | C/T | 22 | — | — | — | — |
| Gm14: 1722192 | T/C | 23 | — | — | — | — |
| Gm14: 1723045 | G/C | 24 | — | — | — | — |
| Gm14: 1724087 | A/G | 25 | — | — | — | — |
| Gm14: 1724245 | A/G | 26 | — | — | — | — |
| Gm14: 1724558 | T/A | 27 | — | — | — | — |
| Gm14: 1724603 | T/C | 28 | — | — | — | — |
| Gm14: 1725318 | A/G | 29 | — | — | — | — |
| Gm14: 1726899 | A/T | 30 | — | — | — | — |
| Gm14: 1738054 | T/G | 31 | — | — | — | — |
| Gm14: 1784545 | A/G | 32 | — | — | — | — |
| Gm14: 1785276 | C/T | 33 | — | — | — | — |
| Gm14: 1793750 | C/T | 34 | — | — | — | — |
| Gm14: 1842226 | T/C | 35 | — | — | — | — |
| Gm14: 1850134 | T/C | 36 | — | — | — | — |
| Gm14: 1850654 | A/G | 37 | — | — | — | — |
| Gm14: 1850808 | C/T | 38 | — | — | — | — |
| Gm14: 1851180 | C/T | 39 | — | — | — | — |
| Gm14: 1851369 | G/C | 40 | — | — | — | — |
| Gm14: 1851467 | A/G | 41 | — | — | — | — |
| Gm14: 1851793 | C/T | 42 | — | — | — | — |
| Gm14: 1852388 | G/T | 43 | — | — | — | — |
| Gm14: 1852579 | C/T | 44 | — | — | — | — |
| Gm14: 1855401 | A/T | 45 | — | — | — | — |
| Gm14: 1867651 | A/G | 46 | — | — | — | — |
| Gm14: 1867913 | A/G | 47 | — | — | — | — |
| Gm14: 1867927 | C/G | 48 | — | — | — | — |
| Gm14: 1910547 | C/A | 49 | — | — | — | — |
| Gm14: 1910746 | T/A | 50 | — | — | — | — |
| Gm14: 1910787 | C/G | 51 | — | — | — | — |
| Gm14: 1911679 | A/T | 52 | — | — | — | — |
| Gm14: 1916729 | A/G | 53 | — | — | — | — |
| Gm14: 1916742 | T/A | 54 | — | — | — | — |
| Gm14: 1919121 | T/C | 55 | — | — | — | — |
| Gm14: 1934770 | C/T | 56 | — | — | — | — |
| Gm14: 1935561 | C/T | 57 | — | — | — | — |
| Gm14: 1935695 | G/A | 58 | — | — | — | — |
| Gm14: 1935949 | A/G | 59 | — | — | — | — |
| Gm14: 1936112 | T/A | 60 | — | — | — | — |
| Gm14: 1936619 | A/G | 61 | — | — | — | — |
| Gm14: 1936750 | T/A | 62 | — | — | — | — |
| Gm14: 1936804 | A/G | 63 | — | — | — | — |
| Gm14: 1936827 | G/A | 64 | — | — | — | — |
| Gm14: 1937070 | T/A | 65 | — | — | — | — |
| Gm14: 1937136 | C/T | 66 | — | — | — | — |
| Gm14: 1937495 | C/A | 67 | — | — | — | — |
| Gm14: 1938061 | A/G | 68 | — | — | — | — |
| Gm14: 1940079 | C/T | 69 | — | — | — | — |
| Gm14: 1940534 | T/C | 70 | — | — | — | — |
| Gm14: 1940728 | G/A | 71 | — | — | — | — |
| Gm14: 1940825 | C/T | 72 | — | — | — | — |
| Gm14: 1941047 | G/A | 73 | — | — | — | — |
| Gm14: 1941105 | G/T | 74 | — | — | — | — |
| Gm14: 1944642 | A/T | 75 | — | — | — | — |
| Gm14: 1700746 | T/C | 76 | — | — | — | — |
| Gm14: 1706616 | G/A | 77 | — | — | — | — |
| Gm14: 1706705 | G/A | 78 | — | — | — | — |
| Gm14: 1706782 | A/G | 79 | — | — | — | — |
| Gm14: 1708836 | C/T | 80 | — | — | — | — |
| Gm14: 1709816 | T/A | 81 | — | — | — | — |
| Gm14: 1712174 | T/A | 82 | — | — | — | — |
| Gm14: 1717270 | A/G | 83 | — | — | — | — |
| Gm14: 1722544 | C/T | 84 | — | — | — | — |
| Gm14: 1723756 | T/A | 85 | — | — | — | — |
| Gm14: 1725153 | T/C | 86 | — | — | — | — |
| Gm14: 1725269 | C/A | 87 | — | — | — | — |
| Gm14: 1726477 | G/C | 88 | — | — | — | — |
| Gm14: 1731690 | C/T | 89 | — | — | — | — |
| Gm14: 1738538 | T/C | 90 | — | — | — | — |
| Gm14: 1739491 | T/G | 91 | — | — | — | — |
| Gm14: 1739824 | G/C | 92 | — | — | — | — |
| Gm14: 1785457 | G/C | 93 | — | — | — | — |
| Gm14: 1787260 | T/G | 94 | — | — | — | — |
| Gm14: 1796497 | T/G | 95 | — | — | — | — |
| Gm14: 1840314 | G/T | 96 | — | — | — | — |
| Gm14: 1842837 | A/G | 97 | — | — | — | — |
| Gm14: 1850412 | C/A | 98 | — | — | — | — |
| Gm14: 1850433 | T/A | 99 | — | — | — | — |
| Gm14: 1850907 | T/A | 100 | — | — | — | — |
| Gm14: 1851535 | T/A | 101 | — | — | — | — |
| Gm14: 1852210 | A/G | 102 | — | — | — | — |
| Gm14: 1859255 | C/T | 103 | — | — | — | — |
| Gm14: 1860411 | G/A | 104 | — | — | — | — |
| Gm14: 1909564 | T/C | 105 | — | — | — | — |
| Gm14: 1910968 | G/T | 106 | — | — | — | — |
| Gm14: 1935936 | A/G | 107 | — | — | — | — |
| Gm14: 1936214 | A/G | 108 | — | — | — | — |
| Gm14: 1936876 | G/A | 109 | — | — | — | — |
| Gm14: 1939030 | C/T | 110 | — | — | — | — |
| Gm14: 1939031 | T/A | 111 | — | — | — | — |
| Gm14: 1939081 | A/G | 112 | — | — | — | — |
| Gm14: 1940392 | A/C | 113 | — | — | — | — |
| Gm14: 1941517 | A/G | 114 | — | — | — | — |
| Gm14: 1989692 | G/A | 115 | — | — | — | — |
| Gm14: 1989717 | C/T | 116 | — | — | — | — |
| Gm14: 1992951 | T/A | 117 | — | — | — | — |
| Gm14: 2003498 | A/G | 118 | — | — | — | — |
| Gm14: 2004242 | A/G | 119 | — | — | — | — |
| Gm14: 2004409 | T/C | 120 | — | — | — | — |
| Gm14: 2006356 | A/T | 121 | — | — | — | — |
| Gm14: 1698254 | A/G | 122 | — | — | — | — |
| Gm14: 1698262 | T/C | 123 | — | — | — | — |
| Gm14: 1698269 | C/T | 124 | — | — | — | — |
| Gm14: 1701170 | T/A | 125 | — | — | — | — |
| Gm14: 1701174 | G/A | 126 | — | — | — | — |
| Gm14: 1701472 | T/A | 127 | — | — | — | — |
| Gm14: 1701825 | G/T | 128 | — | — | — | — |
| Gm14: 1702477 | A/T | 129 | — | — | — | — |
| Gm14: 1702552 | G/A | 130 | — | — | — | — |
| Gm14: 1702622 | T/C | 131 | — | — | — | — |
| Gm14: 1704204 | C/A | 132 | — | — | — | — |
| Gm14: 1705803 | A/G | 133 | — | — | — | — |
| Gm14: 1706201 | T/G | 134 | — | — | — | — |
| Gm14: 1706361 | C/T | 135 | — | — | — | — |
| Gm14: 1706585 | A/G | 136 | — | — | — | — |
| Gm14: 1706915 | T/C | 137 | — | — | — | — |
| Gm14: 1708746 | A/G | 138 | — | — | — | — |
| Gm14: 1713290 | A/T | 139 | — | — | — | — |
| Gm14: 1718056 | A/G | 140 | — | — | — | — |
| Gm14: 1718944 | A/G | 141 | — | — | — | — |
| Gm14: 1719373 | T/C | 142 | — | — | — | — |
| Gm14: 1723066 | A/C | 143 | — | — | — | — |
| Gm14: 1726434 | T/A | 144 | — | — | — | — |
| Gm14: 1726867 | G/A | 145 | — | — | — | — |
| Gm14: 1727235 | A/T | 146 | — | — | — | — |
| Gm14: 1728343 | G/A | 147 | — | — | — | — |
| Gm14: 1730044 | A/G | 148 | — | — | — | — |
| Gm14: 1731518 | T/G | 149 | — | — | — | — |
| Gm14: 1736053 | C/T | 150 | — | — | — | — |
| Gm14: 1738509 | C/T | 151 | — | — | — | — |
| Gm14: 1738914 | A/G | 152 | — | — | — | — |
| Gm14: 1739468 | C/T | 153 | — | — | — | — |
| Gm14: 1739718 | C/T | 154 | — | — | — | — |
| Gm14: 1739772 | T/G | 155 | — | — | — | — |
| Gm14: 1749899 | C/T | 156 | — | — | — | — |
| Gm14: 1785516 | A/G | 157 | — | — | — | — |
| Gm14: 1785559 | G/C | 158 | — | — | — | — |
| Gm14: 1786034 | T/G | 159 | — | — | — | — |
| Gm14: 1786259 | A/C | 160 | — | — | — | — |
| Gm14: 1793453 | A/G | 161 | — | — | — | — |
| Gm14: 1796469 | A/C | 162 | — | — | — | — |
| Gm14: 1797188 | A/G | 163 | — | — | — | — |
| Gm14: 1798987 | G/A | 164 | — | — | — | — |
| Gm14: 1800055 | A/G | 165 | — | — | — | — |
| Gm14: 1842374 | T/A | 166 | — | — | — | — |
| Gm14: 1850066 | A/G | 167 | — | — | — | — |
| Gm14: 1850741 | A/G | 168 | — | — | — | — |
| Gm14: 1850928 | C/T | 169 | — | — | — | — |
| Gm14: 1852469 | T/A | 170 | — | — | — | — |
| Gm14: 1854015 | G/A | 171 | — | — | — | — |
| Gm14: 1854023 | A/C | 172 | — | — | — | — |
| Gm14: 1859810 | T/A | 173 | — | — | — | — |
| Gm14: 1860271 | G/A | 174 | — | — | — | — |
| Gm14: 1862541 | G/A | 175 | — | — | — | — |
| Gm14: 1867332 | A/T | 176 | — | — | — | — |
| Gm14: 1868414 | C/A | 177 | — | — | — | — |
| Gm14: 1919937 | C/T | 178 | — | — | — | — |
| Gm14: 1935444 | T/C | 179 | — | — | — | — |
| Gm14: 1936433 | T/C | 180 | — | — | — | — |
| Gm14: 1937170 | G/A | 181 | — | — | — | — |
| Gm14: 1937923 | T/A | 182 | — | — | — | — |
| Gm14: 1938818 | T/C | 183 | — | — | — | — |
| Gm14: 1939343 | T/C | 184 | — | — | — | — |
| Gm14: 1939364 | T/C | 185 | — | — | — | — |
| Gm14: 1939647 | A/G | 186 | — | — | — | — |
| Gm14: 1939662 | T/A | 187 | — | — | — | — |
| Gm14: 1939746 | C/T | 188 | — | — | — | — |
| Gm14: 1939749 | G/A | 189 | — | — | — | — |
| Gm14: 1940207 | A/T | 190 | — | — | — | — |
| Gm14: 1940573 | A/G | 191 | — | — | — | — |
| Gm14: 1941546 | T/A | 192 | — | — | — | — |
| Gm14: 1945962 | A/T | 193 | — | — | — | — |
| Gm14: 1946355 | A/G | 194 | — | — | — | — |
| Gm14: 1990996 | A/G | 195 | — | — | — | — |
| Gm14: 1991421 | C/T | 196 | — | — | — | — |
| Gm14: 2001506 | T/C | 197 | — | — | — | — |
| Gm14: 2001882 | T/C | 198 | — | — | — | — |
| Gm14: 2003462 | G/A | 199 | — | — | — | — |
| Gm14: 2003672 | T/C | 200 | — | — | — | — |
| Gm14: 1697331 | C/T | 201 | — | — | — | — |
| Gm14: 1698694 | G/A | 202 | — | — | — | — |
| Gm14: 1700508 | C/T | 203 | — | — | — | — |
| Gm14: 1701739 | G/C | 204 | — | — | — | — |
| Gm14: 1701858 | G/T | 205 | — | — | — | — |
| Gm14: 1702110 | A/T | 206 | — | — | — | — |
| Gm14: 1702378 | C/T | 207 | — | — | — | — |
| Gm14: 1706884 | T/C | 208 | — | — | — | — |
| Gm14: 1706973 | T/C | 209 | — | — | — | — |
| Gm14: 1708902 | G/C | 210 | — | — | — | — |
| Gm14: 1711952 | T/A | 211 | — | — | — | — |
| Gm14: 1712050 | C/T | 212 | — | — | — | — |
| Gm14: 1712345 | A/C | 213 | — | — | — | — |
| Gm14: 1717261 | G/T | 214 | — | — | — | — |
| Gm14: 1722228 | T/C | 215 | — | — | — | — |
| Gm14: 1722277 | C/T | 216 | — | — | — | — |
| Gm14: 1723101 | C/T | 217 | — | — | — | — |
| Gm14: 1724793 | T/A | 218 | — | — | — | — |
| Gm14: 1725740 | G/A | 219 | — | — | — | — |
| Gm14: 1726334 | T/A | 220 | — | — | — | — |
| Gm14: 1727170 | T/C | 221 | — | — | — | — |
| Gm14: 1727625 | T/C | 222 | — | — | — | — |
| Gm14: 1730199 | C/T | 223 | — | — | — | — |
| Gm14: 1736329 | G/C | 224 | — | — | — | — |
| Gm14: 1736463 | G/A | 225 | — | — | — | — |
| Gm14: 1736832 | T/C | 226 | — | — | — | — |
| Gm14: 1737771 | G/C | 227 | — | — | — | — |
| Gm14: 1738824 | G/A | 228 | — | — | — | — |
| Gm14: 1738960 | A/C | 229 | — | — | — | — |
| Gm14: 1743818 | G/A | 230 | — | — | — | — |
| Gm14: 1756757 | G/T | 231 | — | — | — | — |
| Gm14: 1760506 | C/T | 232 | — | — | — | — |
| Gm14: 1778710 | T/A | 233 | — | — | — | — |
| Gm14: 1783716 | T/C | 234 | — | — | — | — |
| Gm14: 1784221 | T/A | 235 | — | — | — | — |
| Gm14: 1786098 | G/A | 236 | — | — | — | — |
| Gm14: 1797150 | A/T | 237 | — | — | — | — |
| Gm14: 1797155 | G/A | 238 | — | — | — | — |
| Gm14: 1799977 | T/G | 239 | — | — | — | — |
| Gm14: 1811618 | G/T | 240 | — | — | — | — |
| Gm14: 1812051 | C/G | 241 | — | — | — | — |
| Gm14: 1824464 | A/G | 242 | — | — | — | — |
| Gm14: 1839360 | T/A | 243 | — | — | — | — |
| Gm14: 1843408 | G/C | 244 | — | — | — | — |
| Gm14: 1850104 | T/C | 245 | — | — | — | — |
| Gm14: 1851115 | A/G | 246 | — | — | — | — |
| Gm14: 1851116 | G/A | 247 | — | — | — | — |
| Gm14: 1855960 | G/T | 248 | — | — | — | — |
| Gm14: 1858300 | C/T | 249 | — | — | — | — |
| Gm14: 1860243 | A/G | 250 | — | — | — | — |
| Gm14: 1860675 | C/A | 251 | — | — | — | — |
| Gm14: 1866981 | C/T | 252 | — | — | — | — |
| Gm14: 1869210 | C/A | 253 | — | — | — | — |
| Gm14: 1872625 | A/G | 254 | — | — | — | — |
| Gm14: 1902929 | C/T | 255 | — | — | — | — |
| Gm14: 1913544 | T/C | 256 | — | — | — | — |
| Gm14: 1914780 | T/C | 257 | — | — | — | — |
| Gm14: 1935408 | C/T | 258 | — | — | — | — |
| Gm14: 1936381 | C/T | 259 | — | — | — | — |
| Gm14: 1936425 | A/G | 260 | — | — | — | — |
| Gm14: 1939383 | G/A | 261 | — | — | — | — |
| Gm14: 1988977 | T/A | 262 | — | — | — | — |
| Gm14: 1989052 | A/T | 263 | — | — | — | — |
| Gm14: 1990632 | A/T | 264 | — | — | — | — |
| Gm14: 1990775 | A/G | 265 | — | — | — | — |
| Gm14: 1991550 | G/A | 266 | — | — | — | — |
| Gm14: 1999220 | C/T | 267 | — | — | — | — |
| Gm14: 2003981 | G/A | 268 | — | — | — | — |
| Gm14: 1697620 | G/T | 269 | — | — | — | — |
| Gm14: 1697978 | A/T | 270 | — | — | — | — |
| Gm14: 1699410 | A/G | 271 | — | — | — | — |
| Gm14: 1700636 | G/C | 272 | — | — | — | — |
| Gm14: 1701683 | C/T | 273 | — | — | — | — |
| Gm14: 1701935 | T/C | 274 | — | — | — | — |
| Gm14: 1702661 | T/C | 275 | — | — | — | — |
| Gm14: 1702755 | A/T | 276 | — | — | — | — |
| Gm14: 1704651 | C/T | 277 | — | — | — | — |
| Gm14: 1704664 | C/T | 278 | — | — | — | — |
| Gm14: 1712038 | A/G | 279 | — | — | — | — |
| Gm14: 1712320 | A/C | 280 | — | — | — | — |
| Gm14: 1712713 | A/G | 281 | — | — | — | — |
| Gm14: 1712865 | T/C | 282 | — | — | — | — |
| Gm14: 1712866 | A/T | 283 | — | — | — | — |
| Gm14: 1713999 | T/C | 284 | — | — | — | — |
| Gm14: 1719022 | T/G | 285 | — | — | — | — |
| Gm14: 1728216 | C/T | 286 | — | — | — | — |
| Gm14: 1731767 | T/C | 287 | — | — | — | — |
| Gm14: 1735093 | C/A | 288 | — | — | — | — |
| Gm14: 1735102 | T/A | 289 | — | — | — | — |
| Gm14: 1736945 | A/G | 290 | — | — | — | — |
| Gm14: 1743592 | G/A | 291 | — | — | — | — |
| Gm14: 1748064 | C/T | 292 | — | — | — | — |
| Gm14: 1749126 | C/A | 293 | — | — | — | — |
| Gm14: 1754686 | G/A | 294 | — | — | — | — |
| Gm14: 1757996 | C/G | 295 | — | — | — | — |
| Gm14: 1760483 | C/T | 296 | — | — | — | — |
| Gm14: 1783231 | T/A | 297 | — | — | — | — |
| Gm14: 1783538 | G/A | 298 | — | — | — | — |
| Gm14: 1783756 | T/G | 299 | — | — | — | — |
| Gm14: 1786013 | G/A | 300 | — | — | — | — |
| Gm14: 1787773 | A/G | 301 | — | — | — | — |
| Gm14: 1792218 | C/T | 302 | — | — | — | — |
| Gm14: 1799327 | A/T | 303 | — | — | — | — |
| Gm14: 1799390 | C/T | 304 | — | — | — | — |
| Gm14: 1799540 | T/C | 305 | — | — | — | — |
| Gm14: 1800012 | G/T | 306 | — | — | — | — |
| Gm14: 1800319 | T/G | 307 | — | — | — | — |
| Gm14: 1811113 | T/G | 308 | — | — | — | — |
| Gm14: 1811977 | G/A | 309 | — | — | — | — |
| Gm14: 1824284 | C/T | 310 | — | — | — | — |
| Gm14: 1837872 | C/T | 311 | — | — | — | — |
| Gm14: 1837888 | G/A | 312 | — | — | — | — |
| Gm14: 1851947 | G/A | 313 | — | — | — | — |
| Gm14: 1858277 | G/C | 314 | — | — | — | — |
| Gm14: 1861083 | A/T | 315 | — | — | — | — |
| Gm14: 1887021 | T/G | 316 | — | — | — | — |
| Gm14: 1903293 | C/T | 317 | — | — | — | — |
| Gm14: 1910033 | T/C | 318 | — | — | — | — |
| Gm14: 1919915 | A/G | 319 | — | — | — | — |
| Gm14: 1934737 | A/G | 320 | — | — | — | — |
| Gm14: 1946125 | A/G | 321 | — | — | — | — |
| Gm14: 1958086 | T/C | 322 | — | — | — | — |
| Gm14: 1986602 | T/C | 323 | — | — | — | — |
| Gm14: 1987892 | A/G | 324 | — | — | — | — |
| Gm14: 1988001 | G/A | 325 | — | — | — | — |
| Gm14: 1989951 | A/C | 326 | — | — | — | — |
| Gm14: 1991474 | A/C | 327 | — | — | — | — |
| Gm14: 1997517 | C/A | 328 | — | — | — | — |
| Gm14: 2006319 | C/G | 329 | — | — | — | — |
| Gm14: 2017162 | C/A | 330 | — | — | — | — |
| Gm14: 2019929 | A/G | 331 | — | — | — | — |
| Gm14: 1701692 | C/T | 332 | — | — | — | — |
| Gm14: 1702315 | A/T | 333 | — | — | — | — |
| Gm14: 1702956 | C/G | 334 | — | — | — | — |
| Gm14: 1703980 | A/C | 335 | — | — | — | — |
| Gm14: 1706523 | A/G | 336 | — | — | — | — |
| Gm14: 1711087 | C/A | 337 | — | — | — | — |
| Gm14: 1712377 | C/A | 338 | — | — | — | — |
| Gm14: 1714965 | G/A | 339 | — | — | — | — |
| Gm14: 1727031 | G/A | 340 | — | — | — | — |
| Gm14: 1727851 | A/T | 341 | — | — | — | — |
| Gm14: 1728741 | G/A | 342 | — | — | — | — |
| Gm14: 1729293 | A/G | 343 | — | — | — | — |
| Gm14: 1730480 | A/G | 344 | — | — | — | — |
| Gm14: 1730798 | A/T | 345 | — | — | — | — |
| Gm14: 1731840 | G/A | 346 | — | — | — | — |
| Gm14: 1732232 | G/A | 347 | — | — | — | — |
| Gm14: 1732358 | G/A | 348 | — | — | — | — |
| Gm14: 1732363 | T/G | 349 | — | — | — | — |
| Gm14: 1732403 | T/C | 350 | — | — | — | — |
| Gm14: 1735755 | T/C | 351 | — | — | — | — |
| Gm14: 1735945 | T/C | 352 | — | — | — | — |
| Gm14: 1743425 | A/G | 353 | — | — | — | — |
| Gm14: 1744356 | T/C | 354 | — | — | — | — |
| Gm14: 1746573 | T/C | 355 | — | — | — | — |
| Gm14: 1748959 | A/C | 356 | — | — | — | — |
| Gm14: 1750564 | G/C | 357 | — | — | — | — |
| Gm14: 1753875 | G/A | 358 | — | — | — | — |
| Gm14: 1754007 | A/G | 359 | — | — | — | — |
| Gm14: 1755671 | C/T | 360 | — | — | — | — |
| Gm14: 1756046 | G/T | 361 | — | — | — | — |
| Gm14: 1760299 | T/G | 362 | — | — | — | — |
| Gm14: 1760329 | A/G | 363 | — | — | — | — |
| Gm14: 1761362 | G/T | 364 | — | — | — | — |
| Gm14: 1766162 | T/G | 365 | — | — | — | — |
| Gm14: 1780165 | G/T | 366 | — | — | — | — |
| Gm14: 1780408 | G/A | 367 | — | — | — | — |
| Gm14: 1782983 | C/A | 368 | — | — | — | — |
| Gm14: 1789475 | G/T | 369 | — | — | — | — |
| Gm14: 1799494 | C/G | 370 | — | — | — | — |
| Gm14: 1799548 | C/T | 371 | — | — | — | — |
| Gm14: 1799571 | A/G | 372 | — | — | — | — |
| Gm14: 1811318 | A/T | 373 | — | — | — | — |
| Gm14: 1825691 | T/C | 374 | — | — | — | — |
| Gm14: 1834023 | G/A | 375 | — | — | — | — |
| Gm14: 1841281 | G/A | 376 | — | — | — | — |
| Gm14: 1846850 | T/C | 377 | — | — | — | — |
| Gm14: 1887108 | G/A | 378 | — | — | — | — |
| Gm14: 1887251 | T/C | 379 | — | — | — | — |
| Gm14: 1935369 | C/T | 380 | — | — | — | — |
| Gm14: 1969791 | A/G | 381 | — | — | — | — |
| Gm14: 1981574 | G/C | 382 | — | — | — | — |
| Gm14: 1981644 | G/A | 383 | — | — | — | — |
| Gm14: 1983907 | G/T | 384 | — | — | — | — |
| Gm14: 1986614 | C/G | 385 | — | — | — | — |
| Gm14: 1986675 | G/A | 386 | — | — | — | — |
| Gm14: 1987587 | A/T | 387 | — | — | — | — |
| Gm14: 1988422 | T/G | 388 | — | — | — | — |
| Gm14: 1988424 | C/T | 389 | — | — | — | — |
| Gm14: 1988520 | T/C | 390 | — | — | — | — |
| Gm14: 1988558 | G/A | 391 | — | — | — | — |
| Gm14: 1989403 | G/T | 392 | — | — | — | — |
| Gm14: 1991457 | C/T | 393 | — | — | — | — |
| Gm14: 1991910 | T/G | 394 | — | — | — | — |
| Gm14: 1992830 | T/C | 395 | — | — | — | — |
| Gm14: 1993931 | T/G | 396 | — | — | — | — |
| Gm14: 1997124 | A/G | 397 | — | — | — | — |
| Gm14: 1998879 | C/T | 398 | — | — | — | — |
| Gm14: 2004939 | G/A | 399 | — | — | — | — |
| Gm14: 2005896 | C/T | 400 | — | — | — | — |
| Gm14: 1698816 | A/G | 401 | — | — | — | — |
| Gm14: 1701991 | G/A | 402 | — | — | — | — |
| Gm14: 1710294 | G/A | 403 | — | — | — | — |
| Gm14: 1710303 | C/G | 404 | — | — | — | — |
| Gm14: 1711007 | G/T | 405 | — | — | — | — |
| Gm14: 1711575 | C/T | 406 | — | — | — | — |
| Gm14: 1713816 | G/C | 407 | — | — | — | — |
| Gm14: 1728293 | G/T | 408 | — | — | — | — |
| Gm14: 1729743 | A/G | 409 | — | — | — | — |
| Gm14: 1730281 | A/G | 410 | — | — | — | — |
| Gm14: 1730795 | G/T | 411 | — | — | — | — |
| Gm14: 1732205 | G/C | 412 | — | — | — | — |
| Gm14: 1744432 | A/G | 413 | — | — | — | — |
| Gm14: 1751350 | G/A | 414 | — | — | — | — |
| Gm14: 1755398 | T/A | 415 | — | — | — | — |
| Gm14: 1756188 | G/A | 416 | — | — | — | — |
| Gm14: 1761081 | A/G | 417 | — | — | — | — |
| Gm14: 1761387 | A/G | 418 | — | — | — | — |
| Gm14: 1762867 | A/G | 419 | — | — | — | — |
| Gm14: 1765302 | G/A | 420 | — | — | — | — |
| Gm14: 1777323 | T/A | 421 | — | — | — | — |
| Gm14: 1779323 | A/G | 422 | — | — | — | — |
| Gm14: 1780397 | A/T | 423 | — | — | — | — |
| Gm14: 1800359 | C/T | 424 | — | — | — | — |
| Gm14: 1803234 | A/C | 425 | — | — | — | — |
| Gm14: 1811158 | A/G | 426 | — | — | — | — |
| Gm14: 1825653 | G/A | 427 | — | — | — | — |
| Gm14: 1869500 | G/A | 428 | — | — | — | — |
| Gm14: 1876026 | T/C | 429 | — | — | — | — |
| Gm14: 1876675 | G/A | 430 | — | — | — | — |
| Gm14: 1876844 | G/A | 431 | — | — | — | — |
| Gm14: 1876847 | G/T | 432 | — | — | — | — |
| Gm14: 1879162 | A/T | 433 | — | — | — | — |
| Gm14: 1884603 | T/C | 434 | — | — | — | — |
| Gm14: 1904675 | A/G | 435 | — | — | — | — |
| Gm14: 1944708 | T/C | 436 | — | — | — | — |
| Gm14: 1954056 | C/T | 437 | — | — | — | — |
| Gm14: 1954062 | T/G | 438 | — | — | — | — |
| Gm14: 1967108 | A/G | 439 | — | — | — | — |
| Gm14: 1972107 | C/A | 440 | — | — | — | — |
| Gm14: 2006215 | C/T | 441 | — | — | — | — |
| Gm14: 2011465 | G/C | 442 | — | — | — | — |
| Gm14: 1704689 | G/A | 443 | — | — | — | — |
| Gm14: 1711569 | G/A | 444 | — | — | — | — |
| Gm14: 1713323 | A/C | 445 | — | — | — | — |
| Gm14: 1728052 | G/A | 446 | — | — | — | — |
| Gm14: 1729537 | T/C | 447 | — | — | — | — |
| Gm14: 1732261 | T/A | 448 | — | — | — | — |
| Gm14: 1732593 | A/G | 449 | — | — | — | — |
| Gm14: 1735227 | A/C | 450 | — | — | — | — |
| Gm14: 1744452 | A/G | 451 | — | — | — | — |
| Gm14: 1754156 | A/G | 452 | — | — | — | — |
| Gm14: 1755877 | A/G | 453 | — | — | — | — |
| Gm14: 1756355 | C/A | 454 | — | — | — | — |
| Gm14: 1759702 | A/G | 455 | — | — | — | — |
| Gm14: 1780316 | A/G | 456 | — | — | — | — |
| Gm14: 1801585 | G/T | 457 | — | — | — | — |
| Gm14: 1810099 | A/G | 458 | — | — | — | — |
| Gm14: 1810126 | A/G | 459 | — | — | — | — |
| Gm14: 1810421 | C/T | 460 | — | — | — | — |
| Gm14: 1823776 | C/G | 461 | — | — | — | — |
| Gm14: 1875278 | T/A | 462 | — | — | — | — |
| Gm14: 1875874 | T/G | 463 | — | — | — | — |
| Gm14: 1902961 | G/A | 464 | — | — | — | — |
| Gm14: 1910054 | A/T | 465 | — | — | — | — |
| Gm14: 1949216 | T/A | 466 | — | — | — | — |
| Gm14: 1957357 | G/C | 467 | — | — | — | — |
| Gm14: 1957358 | A/T | 468 | — | — | — | — |
| Gm14: 1960447 | A/T | 469 | — | — | — | — |
| Gm14: 1980728 | C/T | 470 | — | — | — | — |
| Gm14: 1984129 | G/C | 471 | — | — | — | — |
| Gm14: 1992331 | C/T | 472 | — | — | — | — |
| Gm14: 1993147 | T/G | 473 | — | — | — | — |
| Gm14: 1995593 | G/A | 474 | — | — | — | — |
| Gm14: 1995600 | T/C | 475 | — | — | — | — |
| Gm14: 1996952 | G/T | 476 | — | — | — | — |
| Gm14: 1997412 | G/C | 477 | — | — | — | — |
| Gm14: 2004591 | T/A | 478 | — | — | — | — |
| Gm14: 1645762 | G/A | 479 | — | — | — | — |
| Gm14: 1713775 | T/C | 480 | — | — | — | — |
| Gm14: 1716505 | C/A | 481 | — | — | — | — |
| Gm14: 1729186 | A/G | 482 | — | — | — | — |
| Gm14: 1729798 | A/C | 483 | — | — | — | — |
| Gm14: 1732529 | A/G | 484 | — | — | — | — |
| Gm14: 1753922 | T/G | 485 | — | — | — | — |
| Gm14: 1755572 | A/C | 486 | — | — | — | — |
| Gm14: 1759619 | C/T | 487 | — | — | — | — |
| Gm14: 1759635 | C/T | 488 | — | — | — | — |
| Gm14: 1760144 | A/T | 489 | — | — | — | — |
| Gm14: 1761168 | T/G | 490 | — | — | — | — |
| Gm14: 1771612 | C/A | 491 | — | — | — | — |
| Gm14: 1777105 | T/A | 492 | — | — | — | — |
| Gm14: 1778517 | T/C | 493 | — | — | — | — |
| Gm14: 1779288 | T/C | 494 | — | — | — | — |
| Gm14: 1779568 | A/G | 495 | — | — | — | — |
| Gm14: 1804682 | A/C | 496 | — | — | — | — |
| Gm14: 1810135 | A/G | 497 | — | — | — | — |
| Gm14: 1825225 | G/T | 498 | — | — | — | — |
| Gm14: 1828925 | G/T | 499 | — | — | — | — |
| Gm14: 1846994 | G/C | 500 | — | — | — | — |
| Gm14: 1848374 | A/T | 501 | — | — | — | — |
| Gm14: 1874941 | T/C | 502 | — | — | — | — |
| Gm14: 1875261 | G/A | 503 | — | — | — | — |
| Gm14: 1875470 | A/G | 504 | — | — | — | — |
| Gm14: 1879189 | C/T | 505 | — | — | — | — |
| Gm14: 1881168 | G/C | 506 | — | — | — | — |
| Gm14: 1923548 | A/T | 507 | — | — | — | — |
| Gm14: 1923935 | T/C | 508 | — | — | — | — |
| Gm14: 1955048 | G/A | 509 | — | — | — | — |
| Gm14: 1955118 | C/A | 510 | — | — | — | — |
| Gm14: 1955144 | T/C | 511 | — | — | — | — |
| Gm14: 1959610 | T/G | 512 | — | — | — | — |
| Gm14: 1960454 | A/C | 513 | — | — | — | — |
| Gm14: 1967167 | T/G | 514 | — | — | — | — |
| Gm14: 1970908 | C/T | 515 | — | — | — | — |
| Gm14: 1976442 | G/T | 516 | — | — | — | — |
| Gm14: 1981936 | C/A | 517 | — | — | — | — |
| Gm14: 1982632 | C/T | 518 | — | — | — | — |
| Gm14: 1982756 | C/T | 519 | — | — | — | — |
| Gm14: 1984276 | G/T | 520 | — | — | — | — |
| Gm14: 1994907 | A/T | 521 | — | — | — | — |
| Gm14: 2013156 | G/T | 522 | — | — | — | — |
| Gm14: 2019411 | A/G | 523 | — | — | — | — |
| Gm14: 1711379 | G/A | 524 | — | — | — | — |
| Gm14: 1713140 | T/C | 525 | — | — | — | — |
| Gm14: 1727997 | G/A | 526 | — | — | — | — |
| Gm14: 1744286 | A/G | 527 | — | — | — | — |
| Gm14: 1757864 | T/C | 528 | — | — | — | — |
| Gm14: 1759363 | C/T | 529 | — | — | — | — |
| Gm14: 1765933 | A/G | 530 | — | — | — | — |
| Gm14: 1767525 | C/T | 531 | — | — | — | — |
| Gm14: 1767582 | C/G | 532 | — | — | — | — |
| Gm14: 1768845 | C/T | 533 | — | — | — | — |
| Gm14: 1775564 | T/A | 534 | — | — | — | — |
| Gm14: 1778106 | G/A | 535 | — | — | — | — |
| Gm14: 1778621 | T/C | 536 | — | — | — | — |
| Gm14: 1780281 | T/C | 537 | — | — | — | — |
| Gm14: 1780494 | G/A | 538 | — | — | — | — |
| Gm14: 1805372 | C/T | 539 | — | — | — | — |
| Gm14: 1809090 | A/T | 540 | — | — | — | — |
| Gm14: 1810313 | G/A | 541 | — | — | — | — |
| Gm14: 1812109 | T/A | 542 | — | — | — | — |
| Gm14: 1812114 | A/T | 543 | — | — | — | — |
| Gm14: 1824651 | A/G | 544 | — | — | — | — |
| Gm14: 1875656 | A/G | 545 | — | — | — | — |
| Gm14: 1877489 | G/T | 546 | — | — | — | — |
| Gm14: 1878068 | T/C | 547 | — | — | — | — |
| Gm14: 1903061 | G/A | 548 | — | — | — | — |
| Gm14: 1950278 | A/G | 549 | — | — | — | — |
| Gm14: 1950577 | C/G | 550 | — | — | — | — |
| Gm14: 1950969 | G/A | 551 | — | — | — | — |
| Gm14: 1970110 | T/A | 552 | — | — | — | — |
| Gm14: 1982411 | C/T | 553 | — | — | — | — |
| Gm14: 1983489 | T/C | 554 | — | — | — | — |
| Gm14: 1983507 | T/C | 555 | — | — | — | — |
| Gm14: 1983593 | T/C | 556 | — | — | — | — |
| Gm14: 1993730 | G/A | 557 | — | — | — | — |
| Gm14: 1993788 | T/G | 558 | — | — | — | — |
| Gm14: 1993806 | A/G | 559 | — | — | — | — |
| Gm14: 2006229 | C/T | 560 | — | — | — | — |
| Gm14: 2015853 | C/A | 561 | — | — | — | — |
| Gm14: 2359579 | G/A | 562 | — | — | — | — |
| Gm14: 1579650 | G/A | 563 | — | — | — | — |
| Gm14: 1764334 | T/C | 564 | — | — | — | — |
| Gm14: 1764392 | G/A | 565 | — | — | — | — |
| Gm14: 1764403 | T/C | 566 | — | — | — | — |
| Gm14: 1767878 | C/T | 567 | — | — | — | — |
| Gm14: 1805366 | T/G | 568 | — | — | — | — |
| Gm14: 1825173 | A/G | 569 | — | — | — | — |
| Gm14: 1879313 | C/T | 570 | — | — | — | — |
| Gm14: 1886238 | G/C | 571 | — | — | — | — |
| Gm14: 1899408 | G/T | 572 | — | — | — | — |
| Gm14: 1960137 | G/A | 573 | — | — | — | — |
| Gm14: 1971009 | G/C | 574 | — | — | — | — |
| Gm14: 1983348 | T/G | 575 | — | — | — | — |
| Gm14: 2011607 | C/A | 576 | — | — | — | — |
| Gm14: 2012105 | C/T | 577 | — | — | — | — |
| Gm14: 2340746 | A/C | 578 | — | — | — | — |
| Gm14: 1767671 | C/A | 579 | — | — | — | — |
| Gm14: 1771502 | A/G | 580 | — | — | — | — |
| Gm14: 1771578 | A/C | 581 | — | — | — | — |
| Gm14: 1803995 | G/A | 582 | — | — | — | — |
| Gm14: 1805322 | G/A | 583 | — | — | — | — |
| Gm14: 1809988 | C/T | 584 | — | — | — | — |
| Gm14: 1825310 | C/T | 585 | — | — | — | — |
| Gm14: 1888310 | G/A | 586 | — | — | — | — |
| Gm14: 1889307 | A/T | 587 | — | — | — | — |
| Gm14: 1957202 | A/G | 588 | — | — | — | — |
| Gm14: 1981029 | A/C | 589 | — | — | — | — |
| Gm14: 1981073 | A/T | 590 | — | — | — | — |
| Gm14: 1981255 | T/C | 591 | — | — | — | — |
| Gm14: 1992432 | C/G | 592 | — | — | — | — |
| Gm14: 2010834 | C/T | 593 | — | — | — | — |
| Gm14: 1759440 | C/T | 594 | — | — | — | — |
| Gm14: 1775298 | A/T | 595 | — | — | — | — |
| Gm14: 1775605 | C/T | 596 | — | — | — | — |
| Gm14: 1804116 | C/T | 597 | — | — | — | — |
| Gm14: 1804868 | T/C | 598 | — | — | — | — |
| Gm14: 1806330 | C/T | 599 | — | — | — | — |
| Gm14: 1806377 | T/C | 600 | — | — | — | — |
| Gm14: 1889158 | T/C | 601 | — | — | — | — |
| Gm14: 1899428 | T/A | 602 | — | — | — | — |
| Gm14: 1926218 | T/A | 603 | — | — | — | — |
| Gm14: 1928522 | C/T | 604 | — | — | — | — |
| Gm14: 1957206 | T/C | 605 | — | — | — | — |
| Gm14: 1959033 | A/T | 606 | — | — | — | — |
| Gm14: 1969518 | C/T | 607 | — | — | — | — |
| Gm14: 1975722 | A/G | 608 | — | — | — | — |
| Gm14: 1981293 | C/T | 609 | — | — | — | — |
| Gm14: 1983189 | T/A | 610 | — | — | — | — |
| Gm14: 2013786 | T/C | 611 | — | — | — | — |
| Gm14: 2014487 | G/A | 612 | — | — | — | — |
| Gm14: 2191538 | A/C | 613 | — | — | — | — |
| Gm14: 2191541 | C/T | 614 | — | — | — | — |
| Gm14: 2191563 | T/C | 615 | — | — | — | — |
| Gm14: 1711534 | C/A | 616 | — | — | — | — |
| Gm14: 1773993 | C/A | 617 | — | — | — | — |
| Gm14: 1808347 | G/A | 618 | — | — | — | — |
| Gm14: 1808348 | C/A | 619 | — | — | — | — |
| Gm14: 1812356 | T/A | 620 | — | — | — | — |
| Gm14: 1812358 | C/A | 621 | — | — | — | — |
| Gm14: 1874583 | G/T | 622 | — | — | — | — |
| Gm14: 1971096 | C/T | 623 | — | — | — | — |
| Gm14: 1975723 | G/A | 624 | — | — | — | — |
| Gm14: 1976101 | G/C | 625 | — | — | — | — |
| Gm14: 1998648 | T/A | 626 | — | — | — | — |
| Gm14: 2006929 | T/G | 627 | — | — | — | — |
| Gm14: 2013850 | T/A | 628 | — | — | — | — |
| Gm14: 2014479 | T/A | 629 | — | — | — | — |
| Gm14: 2014481 | T/A | 630 | — | — | — | — |
| Gm14: 2101794 | A/T | 631 | — | — | — | — |
| Gm14: 766045 | A/T | 632 | — | — | — | — |
| Gm14: 1801323 | T/A | 633 | — | — | — | — |
| Gm14: 1805026 | A/T | 634 | — | — | — | — |
| Gm14: 1879302 | G/A | 635 | — | — | — | — |
| Gm14: 1975774 | T/C | 636 | — | — | — | — |
| Gm14: 2014429 | G/A | 637 | — | — | — | — |
| Gm14: 2191662 | G/A | 638 | — | — | — | — |
| Gm14: 584976 | C/T | 639 | — | — | — | — |
| Gm14: 2007005 | C/A | 640 | — | — | — | — |
| Gm14: 1650177 | A/C | 641 | — | — | — | — |
| Gm14: 1899046 | A/G | 642 | — | — | — | — |
| Gm14: 806705 | C/T | 643 | — | — | — | — |
| Gm14: 1976057 | G/A | 644 | — | — | — | — |
| Gm14: 1889837 | A/T | 645 | — | — | — | — |
| Gm14: 1727084 | C/G | 646 | 695 | 696 | 697 | 698 |
| S08231-3 | | | | | | |
| Gm14: 1755250 | C/T | 647 | 699 | 700 | 701 | 702 |
| S08255-3 | | | | | | |
| S03188-1 | A/C | 648 | 703 | 704 | 705 | 706 |
| S04492-1 | A/T | 649 | 707 | 708 | 709 | 710 |
| S08256-1 | A/G | 650 | 711 | 712 | 713 | 714 |
| S08257-1 | T/C | 651 | 715 | 716 | 717 | 718 |
| S08231-4 | T/C | 652 | 719 | 720 | 721 | 722 |
| S08241-1 | T/C | 653 | 723 | 724 | 725 | 726 |
| S08251-4 | C/A | 654 | 727 | 728 | 729 | 730 |
| S08251-2 | G/A | 655 | 731 | 732 | 733 | 734 |
| S08255-4 | A/C | 656 | 735 | 736 | 737 | 738 |
| S13721-2 | T/C | 657 | 739 | 740 | 741 | 742 |
| S01591-1 | A/G | 658 | 743 | 744 | 745 | 746 |
| S13722-1 | G/A | 659 | 747 | 748 | 749 | 750 |
| S02987-1 | G/C | 660 | 751 | 752 | 753 | 754 |
| S00802-1 | G/C | 661 | 755 | 756 | 757 | 758 |
| S00777-1 | A/T | 662 | 759 | 760 | 761 | 762 |
| S01799-1 | C/G | 663 | 763 | 764 | 765 | 766 |
| S00288-1 | A/C | 664 | 767 | 768 | 769 | 770 |
| S03923-1 | A/G | 665 | 771 | 772 | 773 | 774 |
| S00341-1 | T/C | 666 | 775 | 776 | 777 | 778 |
| S01718-1 | T/A | 667 | 779 | 780 | 781 | 782 |
| S04785-1 | T/C | 668 | 783 | 784 | 785 | 786 |

| Locus | Region | CDS | Protein |
|---|---|---|---|
| Glyma14g02740.1 | 669 | 670 | 787 |
| Glyma14g02750.1 | 671 | 672 | 788 |
| Glyma14g02780.1 | 673 | 674 | 789 |
| Glyma14g02800.1 | 675 | 676 | 790 |
| Glyma14g02820.1 | 677 | 678 | 791 |
| Glyma14g02920.1 | 679 | 680 | 792 |
| Glyma14g03010.1 | 681 | 682 | 793 |
| Glyma14g03030.1 | 683 | 684 | 794 |
| Glyma14g03050.1 | 685 | 686 | 795 |
| Glyma14g03060.1 | 687 | 688 | 796 |
| Glyma14g03100.1 | 689 | 690 | 797 |
| Glyma14g02710.1 | 691 | 692 | 798 |
| Glyma14g02730.1 | 693 | 694 | 799 |

### DETAILED DESCRIPTION

[0008] Methods for identifying a soybean plant or germplasm having tolerance, improved tolerance, or susceptibility to stem canker, are provided, the methods comprising detecting at least one allele of one or more marker loci associated with stem canker tolerance.

[0009] In some examples, the method involves identifying a soybean plant, germplasm or seed comprising at least one marker locus associated with tolerance to stem canker, in its genome, the method comprising isolating nucleic acids from the plant, germplasm or seed, and detecting at least one allele of one or more marker locus that is associated with stem canker resistance.

[0010] In some examples, the method involves detecting a single marker locus. In other examples, the method involves detecting two marker loci to provide a haplotype or marker profile for the plant or germplasm. In other examples, the method involves detecting two marker loci on different linkage groups or chromosomes to provide a marker profile for the plant or germplasm. In some examples, at least one marker locus is identified using methods of amplifying the marker locus or a portion thereof and detecting the marker amplicon produced.

[0011] In some examples, the method comprises detecting an interval comprising at least one polymorphism associated with tolerance to stem canker. In some examples the interval is flanked by and includes BARC-013365-00489 and BARCSOYSSR_14_0281 on LG B2 (ch14). In some examples the interval is flanked by and includes BARC-013365-00489 and S04785-1 on LG B2 (ch14). In some examples the interval is flanked by and includes BARCSOYSSR_14_0036 and BARCSOYSSR_14_0281 on LG B2 (ch14). In some examples the interval is flanked by and includes positions S03188-1 and S04785-1 on LG B2 (ch14). In some examples the interval is flanked by and includes S03188-1 and S02987-1 on LG B2 (ch14). In some examples the interval is flanked by and includes positions Gm14:584976 and Gm14:2359579 on chromosome 14 (LG B2). In some examples the interval is flanked by and includes positions Gm14:1697331 and Gm14:2019929 on chromosome 14 (LG B2). In some examples the interval is flanked by and includes positions Gm14:1706695 and Gm14:1942681 on chromosome 14 (LG B2). In some examples the interval is flanked by and includes any loci, marker, polymorphism, and/or position disclosed in FIG. 1 and/or any Table or Example provided herein. In some examples the interval is an approximately 30 cM region comprising at least one locus selected from the group consisting of S03188-1, S04492-1, S08256-1, S08257-1, S08231-3, S08231-4, S08241-1, S08251-4, S08251-2, S08255-3, S08255-4, S13721-2, S01591-1, S13722-1, S02987-1, S00802-1, S00777-1, S01799-1, S00288-1, S03923-1, S00341-1, S01718-1, and S04785-1 on LG B2 (ch 14). In some examples the interval is an approximately 20 cM region comprising at least one locus selected from the group consisting of S03188-1, S04492-1, S08256-1, S08257-1, S08231-3, S08231-4, S08241-1, S08251-4, S08251-2, S08255-3, S08255-4, S13721-2, S01591-1, S13722-1, S02987-1, S00802-1, S00777-1, S01799-1, S00288-1, S03923-1, S00341-1, S01718-1, and S04785-1 on LG B2 (ch 14). In some examples the interval is an approximately 10 cM region comprising at least one locus selected from the group consisting of S03188-1, S04492-1, S08256-1, S08257-1, S08231-3, S08231-4, S08241-1, S08251-4, S08251-2, S08255-3, S08255-4, S13721-2, S01591-1, S13722-1, S02987-1, S00802-1, S00777-1, S01799-1, S00288-1, S03923-1, S00341-1, S01718-1, and S04785-1 on LG B2 (ch 14). In some examples the interval is an approximately 5 cM region comprising at least one locus selected from the group consisting of S03188-1, S04492-1, S08256-1, S08257-1, S08231-3, S08231-4, S08241-1, S08251-4, S08251-2, S08255-3, S08255-4, S13721-2, S01591-1, S13722-1, S02987-1, S00802-1, S00777-1, S01799-1, S00288-1, S03923-1, S00341-1, S01718-1, and S04785-1 on LG B2 (ch 14). In some examples the interval is an approximately 30 cM region comprising at least one locus selected from the group consisting of Glyma14g02740.1, Glyma14g02750.1, Glyma14g02780.1, Glyma14g02800.1, Glyma14g02820.1, Glyma14g02920.1, Glyma14g03010.1, Glyma14g03030.1, Glyma14g03050.1, Glyma14g03060.1, Glyma14g03100.1, Glyma14g02710.4, and Glyma14g02730.1 on chromosome 14 (LG B2). In some examples the interval is an approximately 20 cM region comprising at least one locus selected from the group consisting of Glyma14g02740.1, Glyma14g02750.1, Glyma14g02780.1, Glyma14g02800.1, Glyma14g02820.1, Glyma14g02920.1, Glyma14g03010.1, Glyma14g03030.1, Glyma14g03050.1, Glyma14g03060.1, Glyma14g03100.1, Glyma14g02710.4, and Glyma14g02730.1 on chromosome 14 (LG B2). In some examples the interval is an approximately 10 cM region comprising at least one locus selected from the group consisting of Glyma14g02740.1, Glyma14g02750.1, Glyma14g02780.1, Glyma14g02800.1, Glyma14g02820.1, Glyma14g02920.1, Glyma14g03010.1, Glyma14g03030.1, Glyma14g03050.1, Glyma14g03060.1, Glyma14g03100.1, Glyma14g02710.4, and Glyma14g02730.1 on chromosome 14 (LG B2). In some examples the interval is an approximately 5 cM region comprising at least one locus selected from the group consisting of Glyma14g02740.1, Glyma14g02750.1, Glyma14g02780.1, Glyma14g02800.1, Glyma14g02820.1, Glyma14g02920.1, Glyma14g03010.1, Glyma14g03030.1, Glyma14g03050.1, Glyma14g03060.1, Glyma14g03100.1, Glyma14g02710.4, and Glyma14g02730.1 on chromosome 14 (LG B2). In some examples, the interval is detected using a marker linked to the interval. In other examples, the marker is closely linked to the interval. In other examples the marker is in the interval.

[0012] In some examples, one or more marker locus is selected from the group consisting S03188-1, S04492-1, S08256-1, S08257-1, S08231-3, S08231-4, S08241-1, S08251-4, S08251-2, S08255-3, S08255-4, S13721-2, S01591-1, S13722-1, S02987-1, S00802-1, S00777-1, S01799-1, S00288-1, S03923-1, S00341-1, S01718-1, and S04785-1 on LG B2 (ch 14), a marker locus linked or closely linked to any one or more of the marker loci, a marker locus in any one or more of FIG. 1 or Tables 1-13, and any combination thereof.

[0013] In some examples, the method or composition detects one or more nucleotide polymorphisms associated with stem canker resistance, wherein the polymorphism is associated with a polynucleotide selected from the group consisting of Glyma14g02740.1, Glyma14g02750.1, Glyma14g02780.1, Glyma14g02800.1, Glyma14g02820.1, Glyma14g02920.1, Glyma14g03010.1, Glyma14g03030.1, Glyma14g03050.1, Glyma14g03060.1, Glyma14g03100.1, Glyma14g02710.4, and Glyma14g02730.1. In some examples the polymorphism is linked to a polynucleotide selected from the group consisting of Glyma14g02740.1, Glyma14g02750.1, Glyma14g02780.1, Glyma14g02800.1, Glyma14g02820.1, Glyma14g02920.1, Glyma14g03010.1, Glyma14g03030.1, Glyma14g03050.1, Glyma14g03060.1, Glyma14g03100.1, Glyma14g02710.4, and Glyma14g02730.1. In some examples the polymorphism is closely linked to a polynucleotide selected from the group consisting of Glyma14g02740.1, Glyma14g02750.1, Glyma14g02780.1, Glyma14g02800.1, Glyma14g02820.1, Glyma14g02920.1, Glyma14g03010.1, Glyma14g03030.1, Glyma14g03050.1, Glyma14g03060.1, Glyma14g03100.1, Glyma14g02710.4, and Glyma14g02730.1. In some examples the polymorphism is in a polynucleotide selected from the group consisting of Glyma14g02740.1, Glyma14g02750.1, Glyma14g02780.1, Glyma14g02800.1, Glyma14g02820.1, Glyma14g02920.1, Glyma14g03010.1, Glyma14g03030.1, Glyma14g03050.1, Glyma14g03060.1, Glyma14g03100.1, Glyma14g02710.4, and Glyma14g02730.1. In some examples the polymorphism produces a non-synonymous codon change at one or more positions in a polynucleotide selected from the group consisting of Glyma14g02740.1, Glyma14g02750.1, Glyma14g02780.1, Glyma14g02800.1, Glyma14g02820.1, Glyma14g02920.1, Glyma14g03010.1, Glyma14g03030.1, Glyma14g03050.1, Glyma14g03060.1, Glyma14g03100.1, Glyma14g02710.4, and Glyma14g02730.1.

[0014] In some examples, the method or composition detects one or more nucleotide polymorphisms associated with stem canker resistance, wherein the polymorphism is at a position selected from the group consisting of Gm14:1088724, Gm14:1197243, Gm14:1594889, Gm14:1650065, Gm14:1727084, Gm14:1727625, Gm14:1747540, Gm14:1748042, Gm14:1748141, Gm14:1755250, Gm14:1755572, Gm14:1788456, Gm14:1923247, Gm14:1925222, Gm14:2129691, Gm14:3468738, Gm14:3726937, Gm14:3727753, Gm14:4204414, Gm14:4946161, Gm14:5028737, Gm14:5096522, Gm14:1706695, Gm14:1723656, Gm14:1723831, Gm14:1724319, Gm14:1738483, Gm14:1739929, Gm14:1850843, Gm14:1853044, Gm14:1863371, Gm14:1863436, Gm14:1863868, Gm14:1914305, Gm14:1936105, Gm14:1939210, Gm14:1940046, Gm14:1942461, Gm14:1942681, Gm14:1700735, Gm14:1702258, Gm14:1715352, Gm14:1718565, Gm14:1722078, Gm14:1722192, Gm14:1723045, Gm14:1724087, Gm14:1724245, Gm14:1724558, Gm14:1724603, Gm14:1725318, Gm14:1726899, Gm14:1738054, Gm14:1784545, Gm14:1785276, Gm14:1793750, Gm14:1842226, Gm14:1850134, Gm14:1850654, Gm14:1850808, Gm14:1851180, Gm14:1851369, Gm14:1851467, Gm14:1851793, Gm14:1852388, Gm14:1852579, Gm14:1855401, Gm14:1867651, Gm14:1867913, Gm14:1867927, Gm14:1910547, Gm14:1910746, Gm14:1910787, Gm14:1911679, Gm14:1916729, Gm14:1916742, Gm14:1919121, Gm14:1934770, Gm14:1935561, Gm14:1935695, Gm14:1935949, Gm14:1936112, Gm14:1936619, Gm14:1936750, Gm14:1936804, Gm14:1936827, Gm14:1937070, Gm14:1937136, Gm14:1937495, Gm14:1938061, Gm14:1940079, Gm14:1940534, Gm14:1940728, Gm14:1940825, Gm14:1941047, Gm14:1941105, Gm14:1944642, Gm14:1700746, Gm14:1706616, Gm14:1706705, Gm14:1706782, Gm14:1708836, Gm14:1709816, Gm14:1712174, Gm14:1717270, Gm14:1722544, Gm14:1723756, Gm14:1725153, Gm14:1725269, Gm14:1726477, Gm14:1731690, Gm14:1738538, Gm14:1739491, Gm14:1739824, Gm14:1785457, Gm14:1787260, Gm14:1796497, Gm14:1840314, Gm14:1842837, Gm14:1850412, Gm14:1850433, Gm14:1850907, Gm14:1851535, Gm14:1852210, Gm14:1859255, Gm14:1860411, Gm14:1909564, Gm14:1910968, Gm14:1935936, Gm14:1936214, Gm14:1936876, Gm14:1939030, Gm14:1939031, Gm14:1939081, Gm14:1940392, Gm14:1941517, Gm14:1989692, Gm14:1989717, Gm14:1992951, Gm14:2003498, Gm14:2004242, Gm14:2004409, Gm14:2006356, Gm14:1698254, Gm14:1698262, Gm14:1698269, Gm14:1701170, Gm14:1701174, Gm14:1701472, Gm14:1701825, Gm14:1702477, Gm14:1702552, Gm14:1702622, Gm14:1704204, Gm14:1705803, Gm14:1706201, Gm14:1706361, Gm14:1706585, Gm14:1706915, Gm14:1708746, Gm14:1713290, Gm14:1718056, Gm14:1718944, Gm14:1719373, Gm14:1723066, Gm14:1726434, Gm14:1726867, Gm14:1727235, Gm14:1728343, Gm14:1730044, Gm14:1731518, Gm14:1736053, Gm14:1738509, Gm14:1738914, Gm14:1739468, Gm14:1739718, Gm14:1739772, Gm14:1749899, Gm14:1785516, Gm14:1785559, Gm14:1786034, Gm14:1786259, Gm14:1793453, Gm14:1796469, Gm14:1797188, Gm14:1798987, Gm14:1800055, Gm14:1842374, Gm14:1850066, Gm14:1850741, Gm14:1850928, Gm14:1852469, Gm14:1854015, Gm14:1854023, Gm14:1859810, Gm14:1860271, Gm14:1862541, Gm14:1867332, Gm14:1868414, Gm14:1919937, Gm14:1935444, Gm14:1936433, Gm14:1937170, Gm14:1937923, Gm14:1938818, Gm14:1939343, Gm14:1939364, Gm14:1939647, Gm14:1939662, Gm14:1939746, Gm14:1939749, Gm14:1940207, Gm14:1940573, Gm14:1941546, Gm14:1945962, Gm14:1946355, Gm14:1990996, Gm14:1991421, Gm14:2001506, Gm14:2001882, Gm14:2003462, Gm14:2003672, Gm14:1697331, Gm14:1698694, Gm14:1700508, Gm14:1701739, Gm14:1701858, Gm14:1702110, Gm14:1702378, Gm14:1706884, Gm14:1706973, Gm14:1708902, Gm14:1711952, Gm14:1712050, Gm14:1712345, Gm14:1717261, Gm14:1722228, Gm14:1722277, Gm14:1723101, Gm14:1724793, Gm14:1725740, Gm14:1726334, Gm14:1727170, Gm14:1730199, Gm14:1736329, Gm14:1736463, Gm14:1736832, Gm14:1737771, Gm14:1738824, Gm14:1738960, Gm14:1743818, Gm14:1756757, Gm14:1760506, Gm14:1778710, Gm14:1783716, Gm14:1784221, Gm14:1786098, Gm14:1797150, Gm14:1797155, Gm14:1799977, Gm14:1811618, Gm14:1812051, Gm14:1824464, Gm14:1839360, Gm14:1843408, Gm14:1850104, Gm14:1851115, Gm14:1851116, Gm14:1855960, Gm14:1858300, Gm14:1860243, Gm14:1860675, Gm14:1866981, Gm14:1869210, Gm14:1872625, Gm14:1902929, Gm14:1913544, Gm14:1914780, Gm14:1935408, Gm14:1936381, Gm14:1936425, Gm14:1939383, Gm14:1988977, Gm14:1989052, Gm14:1990632, Gm14:1990775, Gm14:1991550, Gm14:1999220, Gm14:2003981, Gm14:1697620, Gm14:1697978, Gm14:1699410, Gm14:1700636, Gm14:1701683, Gm14:1701935, Gm14:1702661, Gm14:1702755, Gm14:1704651, Gm14:1704664, Gm14:1712038, Gm14:1712320, Gm14:1712713, Gm14:1712865, Gm14:1712866, Gm14:1713999, Gm14:1719022, Gm14:1728216, Gm14:1731767, Gm14:1735093, Gm14:1735102, Gm14:1736945, Gm14:1743592, Gm14:1748064, Gm14:1749126, Gm14:1754686, Gm14:1757996, Gm14:1760483, Gm14:1783231, Gm14:1783538, Gm14:1783756, Gm14:1786013, Gm14:1787773, Gm14:1792218, Gm14:1799327, Gm14:1799390, Gm14:1799540, Gm14:1800012, Gm14:1800319, Gm14:1811113, Gm14:1811977, Gm14:1824284, Gm14:1837872, Gm14:1837888, Gm14:1851947, Gm14:1858277, Gm14:1861083, Gm14:1887021, Gm14:1903293, Gm14:1910033, Gm14:1919915, Gm14:1934737, Gm14:1946125, Gm14:1958086, Gm14:1986602, Gm14:1987892, Gm14:1988001, Gm14:1989951, Gm14:1991474, Gm14:1997517, Gm14:2006319, Gm14:2017162, Gm14:2019929, Gm14:1701692, Gm14:1702315, Gm14:1702956, Gm14:1703980, Gm14:1706523, Gm14:1711087, Gm14:1712377, Gm14:1714965, Gm14:1727031, Gm14:1727851, Gm14:1728741, Gm14:1729293, Gm14:1730480, Gm14:1730798, Gm14:1731840, Gm14:1732232, Gm14:1732358, Gm14:1732363, Gm14:1732403, Gm14:1735755, Gm14:1735945, Gm14:1743425, Gm14:1744356, Gm14:1746573, Gm14:1748959, Gm14:1750564, Gm14:1753875, Gm14:1754007, Gm14:1755671, Gm14:1756046, Gm14:1760299, Gm14:1760329, Gm14:1761362, Gm14:1766162, Gm14:1780165, Gm14:1780408, Gm14:1782983, Gm14:1789475, Gm14:1799494, Gm14:1799548, Gm14:1799571, Gm14:1811318, Gm14:1825691, Gm14:1834023, Gm14:1841281, Gm14:1846850, Gm14:1887108, Gm14:1887251, Gm14:1935369, Gm14:1969791, Gm14:1981574, Gm14:1981644, Gm14:1983907, Gm14:1986614, Gm14:1986675, Gm14:1987587, Gm14:1988422, Gm14:1988424, Gm14:1988520, Gm14:1988558, Gm14:1989403, Gm14:1991457, Gm14:1991910, Gm14:1992830, Gm14:1993931, Gm14:1997124, Gm14:1998879, Gm14:2004939, Gm14:2005896, Gm14:1698816, Gm14:1701991, Gm14:1710294, Gm14:1710303, Gm14:1711007, Gm14:1711575, Gm14:1713816, Gm14:1728293, Gm14:1729743, Gm14:1730281, Gm14:1730795, Gm14:1732205, Gm14:1744432, Gm14:1751350, Gm14:1755398, Gm14:1756188, Gm14:1761081, Gm14:1761387, Gm14:1762867, Gm14:1765302, Gm14:1777323, Gm14:1779323, Gm14:1780397, Gm14:1800359, Gm14:1803234, Gm14:1811158, Gm14:1825653, Gm14:1869500, Gm14:1876026, Gm14:1876675, Gm14:1876844, Gm14:1876847, Gm14:1879162, Gm14:1884603, Gm14:1904675, Gm14:1944708, Gm14:1954056, Gm14:1954062, Gm14:1967108, Gm14:1972107, Gm14:2006215, Gm14:2011465, Gm14:1704689, Gm14:1711569, Gm14:1713323, Gm14:1728052, Gm14:1729537, Gm14:1732261, Gm14:1732593, Gm14:1735227, Gm14:1744452, Gm14:1754156, Gm14:1755877, Gm14:1756355, Gm14:1759702, Gm14:1780316, Gm14:1801585, Gm14:1810099, Gm14:1810126, Gm14:1810421, Gm14:1823776, Gm14:1875278, Gm14:1875874, Gm14:1902961, Gm14:1910054, Gm14:1949216, Gm14:1957357, Gm14:1957358, Gm14:1960447, Gm14:1980728, Gm14:1984129, Gm14:1992331, Gm14:1993147, Gm14:1995593, Gm14:1995600, Gm14:1996952, Gm14:1997412, Gm14:2004591, Gm14:1645762, Gm14:1713775, Gm14:1716505, Gm14:1729186, Gm14:1729798, Gm14:1732529, Gm14:1753922, Gm14:1759619, Gm14:1759635, Gm14:1760144, Gm14:1761168, Gm14:1771612, Gm14:1777105, Gm14:1778517, Gm14:1779288, Gm14:1779568, Gm14:1804682, Gm14:1810135, Gm14:1825225, Gm14:1828925, Gm14:1846994, Gm14:1848374, Gm14:1874941, Gm14:1875261, Gm14:1875470, Gm14:1879189, Gm14:1881168, Gm14:1923548, Gm14:1923935, Gm14:1955048, Gm14:1955118, Gm14:1955144, Gm14:1959610, Gm14:1960454, Gm14:1967167, Gm14:1970908, Gm14:1976442, Gm14:1981936, Gm14:1982632, Gm14:1982756, Gm14:1984276, Gm14:1994907, Gm14:2013156, Gm14:2019411, Gm14:1711379, Gm14:1713140, Gm14:1727997, Gm14:1744286, Gm14:1757864, Gm14:1759363, Gm14:1765933, Gm14:1767525, Gm14:1767582, Gm14:1768845, Gm14:1775564, Gm14:1778106, Gm14:1778621, Gm14:1780281, Gm14:1780494, Gm14:1805372, Gm14:1809090, Gm14:1810313, Gm14:1812109, Gm14:1812114, Gm14:1824651, Gm14:1875656, Gm14:1877489, Gm14:1878068, Gm14:1903061, Gm14:1950278, Gm14:1950577, Gm14:1950969, Gm14:1970110, Gm14:1982411, Gm14:1983489, Gm14:1983507, Gm14:1983593, Gm14:1993730, Gm14:1993788, Gm14:1993806, Gm14:2006229, Gm14:2015853, Gm14:2359579, Gm14:1579650, Gm14:1764334, Gm14:1764392, Gm14:1764403, Gm14:1767878, Gm14:1805366, Gm14:1825173, Gm14:1879313, Gm14:1886238, Gm14:1899408, Gm14:1960137, Gm14:1971009, Gm14:1983348, Gm14:2011607, Gm14:2012105, Gm14:2340746, Gm14:1767671, Gm14:1771502, Gm14:1771578, Gm14:1803995, Gm14:1805322, Gm14:1809988, Gm14:1825310, Gm14:1888310, Gm14:1889307, Gm14:1957202, Gm14:1981029, Gm14:1981073, Gm14:1981255, Gm14:1992432, Gm14:2010834, Gm14:1759440, Gm14:1775298, Gm14:1775605, Gm14:1804116, Gm14:1804868, Gm14:1806330, Gm14:1806377, Gm14:1889158, Gm14:1899428, Gm14:1926218, Gm14:1928522, Gm14:1957206, Gm14:1959033, Gm14:1969518, Gm14:1975722, Gm14:1981293, Gm14:1983189, Gm14:2013786, Gm14:2014487, Gm14:2191538, Gm14:2191541, Gm14:2191563, Gm14:1711534, Gm14:1773993, Gm14:1808347, Gm14:1808348, Gm14:1812356, Gm14:1812358, Gm14:1874583, Gm14:1971096, Gm14:1975723, Gm14:1976101, Gm14:1998648, Gm14:2006929, Gm14:2013850, Gm14:2014479, Gm14:2014481, Gm14:2101794, Gm14:766045, Gm14:1801323, Gm14:1805026, Gm14:1879302, Gm14:1975774, Gm14:2014429, Gm14:2191662, Gm14:584976, Gm14:2007005, Gm14:1650177, Gm14:1899046, Gm14:806705, Gm14:1976057, Gm14:2747160, and Gm14:1889837, and any combination thereof.

[0015] In some examples, one or more marker locus is detected using a marker selected from the group consisting of S03188-1-A, S04492-1-A, S08256-1-Q1, S08257-1-Q1, S08231-3-01, S08231-4-01, S08241-1-06, S08251-4-07, S08251-2-010, S08255-3-03, S08255-4-Q1, S13721-2-01, 501591-1-A, S13722-1-01, S02987-1-A, S00802-1-A, S00777-1-A, S01799-1-A, S00288-1-A, S03923-1-A, S00341-1-A, S01718-1-A, and S04785-1-A on LG B2 (ch 14), and any combination thereof.

[0016] In some examples, at least one favorable allele associated with stem canker resistance is selected from the group consisting of allele A of S03188-1, allele A of S04492-1, allele A of S08256-1, allele T of S08257-1, allele C of S08231-3, allele T of S08231-4, allele T of S08241-1, allele C of S08251-4, allele G of S08251-2, allele C of S08255-3, allele A of S08255-4, allele T of S13721-2, allele A of S01591-1, allele G of S13722-1, allele G of S02987-1, allele G of S00802-1, allele A of S00777-1, allele C of S01799-1, allele A of S00288-1, allele A of S03923-1, allele T of S00341-1, allele T of S01718-1, and allele T of S04785-1 on LG B2 (ch 14), and any combination thereof. In some examples the method comprises detecting at least one favorable allele. In other examples, the method comprises detecting more than one favorable allele, up to and including all of the favorable alleles.

[0017] In some examples, at least one favorable allele associated with stem canker resistance is selected from the group consisting of allele A of Gm14:1088724, allele A of Gm14:1197243, allele A of Gm14:1594889, allele T of Gm14:1650065, allele C of Gm14:1727084, allele T of Gm14:1727625, allele T of Gm14:1747540, allele C of Gm14:1748042, allele G of Gm14:1748141, allele C of Gm14:1755250, allele A of Gm14:1755572, allele T of Gm14:1788456, allele A of Gm14:1923247, allele G of Gm14:1925222, allele G of Gm14:2129691, allele G of Gm14:3468738, allele A of Gm14:3726937, allele C of Gm14:3727753, allele A of Gm14:4204414, allele A of Gm14:4946161, allele T of Gm14:5028737, allele T of Gm14:5096522, allele A of Gm14:1706695, allele C of Gm14:1723656, allele G of Gm14:1723831, allele G of Gm14:1724319, allele G of Gm14:1738483, allele A of Gm14:1739929, allele A of Gm14:1850843, allele T of Gm14:1853044, allele G of Gm14:1863371, allele G of Gm14:1863436, allele C of Gm14:1863868, allele C of Gm14:1914305, allele T of Gm14:1936105, allele A of Gm14:1939210, allele C of Gm14:1940046, allele C of Gm14:1942461, allele T of Gm14:1942681, allele T of Gm14:1700735, allele G of Gm14:1702258, allele C of Gm14:1715352, allele A of Gm14:1718565, allele C of Gm14:1722078, allele T of Gm14:1722192, allele G of Gm14:1723045, allele A of Gm14:1724087, allele A of Gm14:1724245, allele T of Gm14:1724558, allele T of Gm14:1724603, allele A of Gm14:1725318, allele A of Gm14:1726899, allele T of Gm14:1738054, allele A of Gm14:1784545, allele C of Gm14:1785276, allele C of Gm14:1793750, allele T of Gm14:1842226, allele T of Gm14:1850134, allele A of Gm14:1850654, allele C of Gm14:1850808, allele C of Gm14:1851180, allele G of Gm14:1851369, allele A of Gm14:1851467, allele C of Gm14:1851793, allele G of Gm14:1852388, allele C of Gm14:1852579, allele A of Gm14:1855401, allele A of Gm14:1867651, allele A of Gm14:1867913, allele C of Gm14:1867927, allele C of Gm14:1910547, allele T of Gm14:1910746, allele C of Gm14:1910787, allele A of Gm14:1911679, allele A of Gm14:1916729, allele T of Gm14:1916742, allele T of Gm14:1919121, allele C of Gm14:1934770, allele C of Gm14:1935561, allele G of Gm14:1935695, allele A of Gm14:1935949, allele T of Gm14:1936112, allele A of Gm14:1936619, allele T of Gm14:1936750, allele A of Gm14:1936804, allele G of Gm14:1936827, allele T of Gm14:1937070, allele C of Gm14:1937136, allele C of Gm14:1937495, allele A of Gm14:1938061, allele C of Gm14:1940079, allele T of Gm14:1940534, allele G of Gm14:1940728, allele C of Gm14:1940825, allele G of Gm14:1941047, allele G of Gm14:1941105, allele A of Gm14:1944642, allele T of Gm14:1700746, allele G of Gm14:1706616, allele G of Gm14:1706705, allele A of Gm14:1706782, allele C of Gm14:1708836, allele T of Gm14:1709816, allele T of Gm14:1712174, allele A of Gm14:1717270, allele C of Gm14:1722544, allele T of Gm14:1723756, allele T of Gm14:1725153, allele C of Gm14:1725269, allele G of Gm14:1726477, allele C of Gm14:1731690, allele T of Gm14:1738538, allele T of Gm14:1739491, allele G of Gm14:1739824, allele G of Gm14:1785457, allele T of Gm14:1787260, allele T of Gm14:1796497, allele G of Gm14:1840314, allele A of Gm14:1842837, allele C of Gm14:1850412, allele T of Gm14:1850433, allele T of Gm14:1850907, allele T of Gm14:1851535, allele A of Gm14:1852210, allele C of Gm14:1859255, allele G of Gm14:1860411, allele T of Gm14:1909564, allele G of Gm14:1910968, allele A of Gm14:1935936, allele A of Gm14:1936214, allele G of Gm14:1936876, allele C of Gm14:1939030, allele T of Gm14:1939031, allele A of Gm14:1939081, allele A of Gm14:1940392, allele A of Gm14:1941517, allele G of Gm14:1989692, allele C of Gm14:1989717, allele T of Gm14:1992951, allele A of Gm14:2003498, allele A of Gm14:2004242, allele T of Gm14:2004409, allele A of Gm14:2006356, allele A of Gm14:1698254, allele T of Gm14:1698262, allele C of Gm14:1698269, allele T of Gm14:1701170, allele G of Gm14:1701174, allele T of Gm14:1701472, allele G of Gm14:1701825, allele A of Gm14:1702477, allele G of Gm14:1702552, allele T of Gm14:1702622, allele C of Gm14:1704204, allele A of Gm14:1705803, allele T of Gm14:1706201, allele C of Gm14:1706361, allele A of Gm14:1706585, allele T of Gm14:1706915, allele A of Gm14:1708746, allele A of Gm14:1713290, allele A of Gm14:1718056, allele A of Gm14:1718944, allele T of Gm14:1719373, allele A of Gm14:1723066, allele T of Gm14:1726434, allele G of Gm14:1726867, allele A of Gm14:1727235, allele G of Gm14:1728343, allele A of Gm14:1730044, allele T of Gm14:1731518, allele C of Gm14:1736053, allele C of Gm14:1738509, allele A of Gm14:1738914, allele C of Gm14:1739468, allele C of Gm14:1739718, allele T of Gm14:1739772, allele C of Gm14:1749899, allele A of Gm14:1785516, allele G of Gm14:1785559, allele T of Gm14:1786034, allele A of Gm14:1786259, allele A of Gm14:1793453, allele A of Gm14:1796469, allele A of Gm14:1797188, allele G of Gm14:1798987, allele A of Gm14:1800055, allele T of Gm14:1842374, allele A of Gm14:1850066, allele A of Gm14:1850741, allele C of Gm14:1850928, allele T of Gm14:1852469, allele G of Gm14:1854015, allele A of Gm14:1854023, allele T of Gm14:1859810, allele G of Gm14:1860271, allele G of Gm14:1862541, allele A of Gm14:1867332, allele C of Gm14:1868414, allele C of Gm14:1919937, allele T of Gm14:1935444, allele T of Gm14:1936433, allele G of Gm14:1937170, allele T of Gm14:1937923, allele T of Gm14:1938818, allele T of Gm14:1939343, allele T of Gm14:1939364, allele A of Gm14:1939647, allele T of Gm14:1939662, allele C of Gm14:1939746, allele G of Gm14:1939749, allele A of Gm14:1940207, allele A of Gm14:1940573, allele T of Gm14:1941546, allele A of Gm14:1945962, allele A of Gm14:1946355, allele A of Gm14:1990996, allele C of Gm14:1991421, allele T of Gm14:2001506, allele T of Gm14:2001882, allele G of Gm14:2003462, allele T of Gm14:2003672, allele C of Gm14:1697331, allele G of Gm14:1698694, allele C of Gm14:1700508, allele G of Gm14:1701739, allele G of Gm14:1701858, allele A of Gm14:1702110, allele C of Gm14:1702378, allele T of Gm14:1706884, allele T of Gm14:1706973, allele G of Gm14:1708902, allele T of Gm14:1711952, allele C of Gm14:1712050, allele A of Gm14:1712345, allele G of Gm14:1717261, allele T of Gm14:1722228, allele C of Gm14:1722277, allele C of Gm14:1723101, allele T of Gm14:1724793, allele G of Gm14:1725740, allele T of Gm14:1726334, allele T of Gm14:1727170, allele C of Gm14:1730199, allele G of Gm14:1736329, allele G of Gm14:1736463, allele T of Gm14:1736832, allele G of Gm14:1737771, allele G of Gm14:1738824, allele A of Gm14:1738960, allele G of Gm14:1743818, allele G of Gm14:1756757, allele C of Gm14:1760506, allele T of Gm14:1778710, allele T of Gm14:1783716, allele T of Gm14:1784221, allele G of Gm14:1786098, allele A of Gm14:1797150, allele G of Gm14:1797155, allele T of Gm14:1799977, allele G of Gm14:1811618, allele C of Gm14:1812051, allele A of Gm14:1824464, allele T of Gm14:1839360, allele G of Gm14:1843408, allele T of Gm14:1850104, allele A of Gm14:1851115, allele G of Gm14:1851116, allele G of Gm14:1855960, allele C of Gm14:1858300, allele A of Gm14:1860243, allele C of Gm14:1860675, allele C of Gm14:1866981, allele C of Gm14:1869210, allele A of Gm14:1872625, allele C of Gm14:1902929, allele T of Gm14:1913544, allele T of Gm14:1914780, allele C of Gm14:1935408, allele C of Gm14:1936381, allele A of Gm14:1936425, allele G of Gm14:1939383, allele T of Gm14:1988977, allele A of Gm14:1989052, allele A of Gm14:1990632, allele A of Gm14:1990775, allele G of Gm14:1991550, allele C of Gm14:1999220, allele G of Gm14:2003981, allele G of Gm14:1697620, allele A of Gm14:1697978, allele A of Gm14:1699410, allele G of Gm14:1700636, allele C of Gm14:1701683, allele T of Gm14:1701935, allele T of Gm14:1702661, allele A of Gm14:1702755, allele C of Gm14:1704651, allele C of Gm14:1704664, allele A of Gm14:1712038, allele A of Gm14:1712320, allele A of Gm14:1712713, allele T of Gm14:1712865, allele A of Gm14:1712866, allele T of Gm14:1713999, allele T of Gm14:1719022, allele C of Gm14:1728216, allele T of Gm14:1731767, allele C of Gm14:1735093, allele T of Gm14:1735102, allele A of Gm14:1736945, allele G of Gm14:1743592, allele C of Gm14:1748064, allele C of Gm14:1749126, allele G of Gm14:1754686, allele C of Gm14:1757996, allele C of Gm14:1760483, allele T of Gm14:1783231, allele G of Gm14:1783538, allele T of Gm14:1783756, allele G of Gm14:1786013, allele A of Gm14:1787773, allele C of Gm14:1792218, allele A of Gm14:1799327, allele C of Gm14:1799390, allele T of Gm14:1799540, allele G of Gm14:1800012, allele T of Gm14:1800319, allele T of Gm14:1811113, allele G of Gm14:1811977, allele C of Gm14:1824284, allele C of Gm14:1837872, allele G of Gm14:1837888, allele G of Gm14:1851947, allele G of Gm14:1858277, allele A of Gm14:1861083, allele T of Gm14:1887021, allele C of Gm14:1903293, allele T of Gm14:1910033, allele A of Gm14:1919915, allele A of Gm14:1934737, allele A of Gm14:1946125, allele T of Gm14:1958086, allele T of Gm14:1986602, allele A of Gm14:1987892, allele G of Gm14:1988001, allele A of Gm14:1989951, allele A of Gm14:1991474, allele C of Gm14:1997517, allele C of Gm14:2006319, allele C of Gm14:2017162, allele A of Gm14:2019929, allele C of Gm14:1701692, allele A of Gm14:1702315, allele C of Gm14:1702956, allele A of Gm14:1703980, allele A of Gm14:1706523, allele C of Gm14:1711087, allele C of Gm14:1712377, allele G of Gm14:1714965, allele G of Gm14:1727031, allele A of Gm14:1727851, allele G of Gm14:1728741, allele A of Gm14:1729293, allele A of Gm14:1730480, allele A of Gm14:1730798, allele G of Gm14:1731840, allele G of Gm14:1732232, allele G of Gm14:1732358, allele T of Gm14:1732363, allele T of Gm14:1732403, allele T of Gm14:1735755, allele T of Gm14:1735945, allele A of Gm14:1743425, allele T of Gm14:1744356, allele T of Gm14:1746573, allele A of Gm14:1748959, allele G of Gm14:1750564, allele G of Gm14:1753875, allele A of Gm14:1754007, allele C of Gm14:1755671, allele G of Gm14:1756046, allele T of Gm14:1760299, allele A of Gm14:1760329, allele G of Gm14:1761362, allele T of Gm14:1766162, allele G of Gm14:1780165, allele G of Gm14:1780408, allele C of Gm14:1782983, allele G of Gm14:1789475, allele C of Gm14:1799494, allele C of Gm14:1799548, allele A of Gm14:1799571, allele A of Gm14:1811318, allele T of Gm14:1825691, allele G of Gm14:1834023, allele G of Gm14:1841281, allele T of Gm14:1846850, allele G of Gm14:1887108, allele T of Gm14:1887251, allele C of Gm14:1935369, allele A of Gm14:1969791, allele G of Gm14:1981574, allele G of Gm14:1981644, allele G of Gm14:1983907, allele C of Gm14:1986614, allele G of Gm14:1986675, allele A of Gm14:1987587, allele T of Gm14:1988422, allele C of Gm14:1988424, allele T of Gm14:1988520, allele G of Gm14:1988558, allele G of Gm14:1989403, allele C of Gm14:1991457, allele T of Gm14:1991910, allele T of Gm14:1992830, allele T of Gm14:1993931, allele A of Gm14:1997124, allele C of Gm14:1998879, allele G of Gm14:2004939, allele C of Gm14:2005896, allele A of Gm14:1698816, allele G of Gm14:1701991, allele G of Gm14:1710294, allele C of Gm14:1710303, allele G of Gm14:1711007, allele C of Gm14:1711575, allele G of Gm14:1713816, allele G of Gm14:1728293, allele A of Gm14:1729743, allele A of Gm14:1730281, allele G of Gm14:1730795, allele G of Gm14:1732205, allele A of Gm14:1744432, allele G of Gm14:1751350, allele T of Gm14:1755398, allele G of Gm14:1756188, allele A of Gm14:1761081, allele A of Gm14:1761387, allele A of Gm14:1762867, allele G of Gm14:1765302, allele T of Gm14:1777323, allele A of Gm14:1779323, allele A of Gm14:1780397, allele C of Gm14:1800359, allele A of Gm14:1803234, allele A of Gm14:1811158, allele G of Gm14:1825653, allele G of Gm14:1869500, allele T of Gm14:1876026, allele G of Gm14:1876675, allele G of Gm14:1876844, allele G of Gm14:1876847, allele A of Gm14:1879162, allele T of Gm14:1884603, allele A of Gm14:1904675, allele T of Gm14:1944708, allele C of Gm14:1954056, allele T of Gm14:1954062, allele A of Gm14:1967108, allele C of Gm14:1972107, allele C of Gm14:2006215, allele G of Gm14:2011465, allele G of Gm14:1704689, allele G of Gm14:1711569, allele A of Gm14:1713323, allele G of Gm14:1728052, allele T of Gm14:1729537, allele T of Gm14:1732261, allele A of Gm14:1732593, allele A of Gm14:1735227, allele A of Gm14:1744452, allele A of Gm14:1754156, allele A of Gm14:1755877, allele C of Gm14:1756355, allele A of Gm14:1759702, allele A of Gm14:1780316, allele G of Gm14:1801585, allele A of Gm14:1810099, allele A of Gm14:1810126, allele C of Gm14:1810421, allele C of Gm14:1823776, allele T of Gm14:1875278, allele T of Gm14:1875874, allele G of Gm14:1902961, allele A of Gm14:1910054, allele T of Gm14:1949216, allele G of Gm14:1957357, allele A of Gm14:1957358, allele A of Gm14:1960447, allele C of Gm14:1980728, allele G of Gm14:1984129, allele C of Gm14:1992331, allele T of Gm14:1993147, allele G of Gm14:1995593, allele T of Gm14:1995600, allele G of Gm14:1996952, allele G of Gm14:1997412, allele T of Gm14:2004591, allele G of Gm14:1645762, allele T of Gm14:1713775, allele C of Gm14:1716505, allele A of Gm14:1729186, allele A of Gm14:1729798, allele A of Gm14:1732529, allele T of Gm14:1753922, allele C of Gm14:1759619, allele C of Gm14:1759635, allele A of Gm14:1760144, allele T of Gm14:1761168, allele C of Gm14:1771612, allele T of Gm14:1777105, allele T of Gm14:1778517, allele T of Gm14:1779288, allele A of Gm14:1779568, allele A of Gm14:1804682, allele A of Gm14:1810135, allele G of Gm14:1825225, allele G of Gm14:1828925, allele G of Gm14:1846994, allele A of Gm14:1848374, allele T of Gm14:1874941, allele G of Gm14:1875261, allele A of Gm14:1875470, allele C of Gm14:1879189, allele G of Gm14:1881168, allele A of Gm14:1923548, allele T of Gm14:1923935, allele G of Gm14:1955048, allele C of Gm14:1955118, allele T of Gm14:1955144, allele T of Gm14:1959610, allele A of Gm14:1960454, allele T of Gm14:1967167, allele C of Gm14:1970908, allele G of Gm14:1976442, allele C of Gm14:1981936, allele C of Gm14:1982632, allele C of Gm14:1982756, allele G of Gm14:1984276, allele A of Gm14:1994907, allele G of Gm14:2013156, allele A of Gm14:2019411, allele G of Gm14:1711379, allele T of Gm14:1713140, allele G of Gm14:1727997, allele A of Gm14:1744286, allele T of Gm14:1757864, allele C of Gm14:1759363, allele A of Gm14:1765933, allele C of Gm14:1767525, allele C of Gm14:1767582, allele C of Gm14:1768845, allele T of Gm14:1775564, allele G of Gm14:1778106, allele T of Gm14:1778621, allele T of Gm14:1780281, allele G of Gm14:1780494, allele C of Gm14:1805372, allele A of Gm14:1809090, allele G of Gm14:1810313, allele T of Gm14:1812109, allele A of Gm14:1812114, allele A of Gm14:1824651, allele A of Gm14:1875656, allele G of Gm14:1877489, allele T of Gm14:1878068, allele G of Gm14:1903061, allele A of Gm14:1950278, allele C of Gm14:1950577, allele G of Gm14:1950969, allele T of Gm14:1970110, allele C of Gm14:1982411, allele T of Gm14:1983489, allele T of Gm14:1983507, allele T of Gm14:1983593, allele G of Gm14:1993730, allele T of Gm14:1993788, allele A of Gm14:1993806, allele C of Gm14:2006229, allele C of Gm14:2015853, allele G of Gm14:2359579, allele G of Gm14:1579650, allele T of Gm14:1764334, allele G of Gm14:1764392, allele T of Gm14:1764403, allele C of Gm14:1767878, allele T of Gm14:1805366, allele A of Gm14:1825173, allele C of Gm14:1879313, allele G of Gm14:1886238, allele G of Gm14:1899408, allele G of Gm14:1960137, allele G of Gm14:1971009, allele T of Gm14:1983348, allele C of Gm14:2011607, allele C of Gm14:2012105, allele A of Gm14:2340746, allele C of Gm14:1767671, allele A of Gm14:1771502, allele A of Gm14:1771578, allele G of Gm14:1803995, allele G of Gm14:1805322, allele C of Gm14:1809988, allele C of Gm14:1825310, allele G of Gm14:1888310, allele A of Gm14:1889307, allele A of Gm14:1957202, allele A of Gm14:1981029, allele A of Gm14:1981073, allele T of Gm14:1981255, allele C of Gm14:1992432, allele C of Gm14:2010834, allele C of Gm14:1759440, allele A of Gm14:1775298, allele C of Gm14:1775605, allele C of Gm14:1804116, allele T of Gm14:1804868, allele C of Gm14:1806330, allele T of Gm14:1806377, allele T of Gm14:1889158, allele T of Gm14:1899428, allele T of Gm14:1926218, allele C of Gm14:1928522, allele T of Gm14:1957206, allele A of Gm14:1959033, allele C of Gm14:1969518, allele A of Gm14:1975722, allele C of Gm14:1981293, allele T of Gm14:1983189, allele T of Gm14:2013786, allele G of Gm14:2014487, allele A of Gm14:2191538, allele C of Gm14:2191541, allele T of Gm14:2191563, allele C of Gm14:1711534, allele C of Gm14:1773993, allele G of Gm14:1808347, allele C of Gm14:1808348, allele T of Gm14:1812356, allele C of Gm14:1812358, allele G of Gm14:1874583, allele C of Gm14:1971096, allele G of Gm14:1975723, allele G of Gm14:1976101, allele T of Gm14:1998648, allele T of Gm14:2006929, allele T of Gm14:2013850, allele T of Gm14:2014479, allele T of Gm14:2014481, allele A of Gm14:2101794, allele A of Gm14:766045, allele T of Gm14:1801323, allele A of Gm14:1805026, allele G of Gm14:1879302, allele T of Gm14:1975774, allele G of Gm14:2014429, allele G of Gm14:2191662, allele C of Gm14:584976, allele C of Gm14:2007005, allele A of Gm14:1650177, allele A of Gm14:1899046, allele C of Gm14:806705, allele G of Gm14:1976057, allele T of Gm14:2747160, and allele A of Gm14:1889837, and any combination thereof. In some examples the method comprises detecting at least one favorable allele. In other examples, the method comprises detecting more than one favorable allele, up to and including all of the favorable alleles.

[0018] In some examples, the one or more alleles are favorable alleles that positively correlate with tolerance or improved tolerance to stem canker. In other examples, the one or more alleles are disfavored alleles that positively correlate with susceptibility or increased susceptibility to stem canker. In some examples, at least one allele is a favorable allele that positively correlates with improved stem canker resistance when compared to a soybean plant lacking the favorable allele.

[0019] Marker loci, haplotypes and marker profiles associated with tolerance or improved tolerance to stem canker, are provided. Further provided are genomic loci that are associated with soybean tolerance or improved tolerance to stem canker. In certain examples, soybean plants or germplasm are identified that have at least one favorable allele, marker locus, haplotype or marker profile that positively correlates with tolerance or improved tolerance to stem canker. However, it is useful for exclusionary purposes during breeding to identify alleles, marker loci, haplotypes, or marker profiles that negatively correlate with tolerance, for example, to eliminate such plants or germplasm from subsequent rounds of breeding.

[0020] In one example, marker loci useful for identifying a first soybean plant or first soybean germplasm that displays tolerance or improved tolerance to stem canker are associated with an interval from about 0 cM to about 30 cM on linkage group B2. In some examples the interval is from about 2, 5, 10, 15, 20, 25, 30, 35, 40, 45, 50, 55, 60 or more cM on linkage group B2. In some examples, the interval associated with tolerance or improved tolerance to stem canker is flanked by and includes BARC-013365-00489 and BARCSOYSSR_14_0281 on linkage group B2. In some examples, the interval associated with tolerance or improved tolerance to stem canker is flanked by and includes BARC-013365-00489 and S04785-1 on linkage group B2. In some examples, the interval associated with tolerance or improved tolerance to stem canker is flanked by and includes BARCSOYSSR_14_0036 and BARCSOYSSR_14_0281 on linkage group B2. In other examples, the interval is flanked by and includes S03188-1 and S04785-1 on linkage group B2. In some examples, the interval associated with tolerance or improved tolerance to stem canker is flanked by and includes S03188-1 and S02987-1 on linkage group B2. In other examples, the interval is flanked by and includes nucleotide positions Gm14:584976 and Gm14:2359579. In other examples, the interval is flanked by and includes nucleotide positions Gm14:1697331 and Gm14:2019929. In other examples, the interval is flanked by and includes nucleotide positions Gm14:1706695 and Gm14:1942681. In some examples, the interval comprises at least one or more loci selected from the group consisting of S03188-1, S04492-1, S08256-1, S08257-1, S08231-3, S08231-4, S08241-1, S08251-4, S08251-2, S08255-3, S08255-4, S13721-2, S01591-1, S13722-1, S02987-1, S00802-1, S00777-1, S01799-1, S00288-1, S03923-1, S00341-1, S01718-1, and S04785-1 on LG B2 (ch 14). In some examples the interval comprises one or more loci identified and provided in FIG. 1, or any one of Tables 1-13, or a marker closely linked thereto on linkage group B2.

[0021] Kits for characterizing a soybean plant, germplasm or seed are also provided. In some examples a kit comprises primers and/or probes for detecting one or more markers for one or more polynucleotides associated with stem canker tolerance, and instructions for using the primers and/or probes to detect the one or more marker loci and for correlating the detected marker loci with predicted tolerance to stem canker. In some examples the kit comprises at least one primer and/or probe which has a heterologous label that facilitates detection of at least one of a locus, marker, allele, sequence, and/or polymorphism of interest. In some examples, one or more marker loci are selected from the group consisting of S03188-1, S04492-1, S08256-1, S08257-1, S08231-3, S08231-4, S08241-1, S08251-4, S08251-2, S08255-3, S08255-4, S13721-2, S01591-1, S13722-1, S02987-1, S00802-1, S00777-1, S01799-1, S00288-1, S03923-1, S00341-1, S01718-1, and S04785-1 on LG B2 (ch 14), and markers closely linked thereto. In some examples, the primers or probes comprise one or more of SEQ ID NOs: 1-786. In some examples the kit further comprises a buffer or other reagent. In some examples, the kit can include one or more primers or probes for detecting one or more markers for another trait of interest. In some examples, the trait of interest is a transgene. In some example the trait of interest is a native trait.

[0022] Isolated polynucleotides are also provided. In one example, an isolated polynucleotide for detecting a marker locus associated with stem canker tolerance is provided. In some examples the isolated polynucleotide comprises at least one heterologous label that facilitates detection of at least one of a locus, marker, allele, sequence, and/or polymorphism of interest. In some examples isolated polynucleotides include a polynucleotide that detects a polymorphism at a locus selected from the group consisting of S03188-1, S04492-1, S08256-1, S08257-1, S08231-3, S08231-4, S08241-1, S08251-4, S08251-2, S08255-3, S08255-4, S13721-2, S01591-1, S13722-1, S02987-1, S00802-1, S00777-1, S01799-1, S00288-1, S03923-1, S00341-1, S01718-1, and S04785-1 on LG B2 (ch 14). In some examples isolated polynucleotides include a polynucleotide that detects a polymorphism selected from the group consisting of Gm14:1088724, Gm14:1197243, Gm14:1594889, Gm14:1650065, Gm14:1727084, Gm14:1727625, Gm14:1747540, Gm14:1748042, Gm14:1748141, Gm14:1755250, Gm14:1755572, Gm14:1788456, Gm14:1923247, Gm14:1925222, Gm14:2129691, Gm14:3468738, Gm14:3726937, Gm14:3727753, Gm14:4204414, Gm14:4946161, Gm14:5028737, Gm14:5096522, Gm14:1706695, Gm14:1723656, Gm14:1723831, Gm14:1724319, Gm14:1738483, Gm14:1739929, Gm14:1850843, Gm14:1853044, Gm14:1863371, Gm14:1863436, Gm14:1863868, Gm14:1914305, Gm14:1936105, Gm14:1939210, Gm14:1940046, Gm14:1942461, Gm14:1942681, Gm14:1700735, Gm14:1702258, Gm14:1715352, Gm14:1718565, Gm14:1722078, Gm14:1722192, Gm14:1723045, Gm14:1724087, Gm14:1724245, Gm14:1724558, Gm14:1724603, Gm14:1725318, Gm14:1726899, Gm14:1738054, Gm14:1784545, Gm14:1785276, Gm14:1793750, Gm14:1842226, Gm14:1850134, Gm14:1850654, Gm14:1850808, Gm14:1851180, Gm14:1851369, Gm14:1851467, Gm14:1851793, Gm14:1852388, Gm14:1852579, Gm14:1855401, Gm14:1867651, Gm14:1867913, Gm14:1867927, Gm14:1910547, Gm14:1910746, Gm14:1910787, Gm14:1911679, Gm14:1916729, Gm14:1916742, Gm14:1919121, Gm14:1934770, Gm14:1935561, Gm14:1935695, Gm14:1935949, Gm14:1936112, Gm14:1936619, Gm14:1936750, Gm14:1936804, Gm14:1936827, Gm14:1937070, Gm14:1937136, Gm14:1937495, Gm14:1938061, Gm14:1940079, Gm14:1940534, Gm14:1940728, Gm14:1940825, Gm14:1941047, Gm14:1941105, Gm14:1944642, Gm14:1700746, Gm14:1706616, Gm14:1706705, Gm14:1706782, Gm14:1708836, Gm14:1709816, Gm14:1712174, Gm14:1717270, Gm14:1722544, Gm14:1723756, Gm14:1725153, Gm14:1725269, Gm14:1726477, Gm14:1731690, Gm14:1738538, Gm14:1739491, Gm14:1739824, Gm14:1785457, Gm14:1787260, Gm14:1796497, Gm14:1840314, Gm14:1842837, Gm14:1850412, Gm14:1850433, Gm14:1850907, Gm14:1851535, Gm14:1852210, Gm14:1859255, Gm14:1860411, Gm14:1909564, Gm14:1910968, Gm14:1935936, Gm14:1936214, Gm14:1936876, Gm14:1939030, Gm14:1939031, Gm14:1939081, Gm14:1940392, Gm14:1941517, Gm14:1989692, Gm14:1989717, Gm14:1992951, Gm14:2003498, Gm14:2004242, Gm14:2004409, Gm14:2006356, Gm14:1698254, Gm14:1698262, Gm14:1698269, Gm14:1701170, Gm14:1701174, Gm14:1701472, Gm14:1701825, Gm14:1702477, Gm14:1702552, Gm14:1702622, Gm14:1704204, Gm14:1705803, Gm14:1706201, Gm14:1706361, Gm14:1706585, Gm14:1706915, Gm14:1708746, Gm14:1713290, Gm14:1718056, Gm14:1718944, Gm14:1719373, Gm14:1723066, Gm14:1726434, Gm14:1726867, Gm14:1727235, Gm14:1728343, Gm14:1730044, Gm14:1731518, Gm14:1736053, Gm14:1738509, Gm14:1738914, Gm14:1739468, Gm14:1739718, Gm14:1739772, Gm14:1749899, Gm14:1785516, Gm14:1785559, Gm14:1786034, Gm14:1786259, Gm14:1793453, Gm14:1796469, Gm14:1797188, Gm14:1798987, Gm14:1800055, Gm14:1842374, Gm14:1850066, Gm14:1850741, Gm14:1850928, Gm14:1852469, Gm14:1854015, Gm14:1854023, Gm14:1859810, Gm14:1860271, Gm14:1862541, Gm14:1867332, Gm14:1868414, Gm14:1919937, Gm14:1935444, Gm14:1936433, Gm14:1937170, Gm14:1937923, Gm14:1938818, Gm14:1939343, Gm14:1939364, Gm14:1939647, Gm14:1939662, Gm14:1939746, Gm14:1939749, Gm14:1940207, Gm14:1940573, Gm14:1941546, Gm14:1945962, Gm14:1946355, Gm14:1990996, Gm14:1991421, Gm14:2001506, Gm14:2001882, Gm14:2003462, Gm14:2003672, Gm14:1697331, Gm14:1698694, Gm14:1700508, Gm14:1701739, Gm14:1701858, Gm14:1702110, Gm14:1702378, Gm14:1706884, Gm14:1706973, Gm14:1708902, Gm14:1711952, Gm14:1712050, Gm14:1712345, Gm14:1717261, Gm14:1722228, Gm14:1722277, Gm14:1723101, Gm14:1724793, Gm14:1725740, Gm14:1726334, Gm14:1727170, Gm14:1730199, Gm14:1736329, Gm14:1736463, Gm14:1736832, Gm14:1737771, Gm14:1738824, Gm14:1738960, Gm14:1743818, Gm14:1756757, Gm14:1760506, Gm14:1778710, Gm14:1783716, Gm14:1784221, Gm14:1786098, Gm14:1797150, Gm14:1797155, Gm14:1799977, Gm14:1811618, Gm14:1812051, Gm14:1824464, Gm14:1839360, Gm14:1843408, Gm14:1850104, Gm14:1851115, Gm14:1851116, Gm14:1855960, Gm14:1858300, Gm14:1860243, Gm14:1860675, Gm14:1866981, Gm14:1869210, Gm14:1872625, Gm14:1902929, Gm14:1913544, Gm14:1914780, Gm14:1935408, Gm14:1936381, Gm14:1936425, Gm14:1939383, Gm14:1988977, Gm14:1989052, Gm14:1990632, Gm14:1990775, Gm14:1991550, Gm14:1999220, Gm14:2003981, Gm14:1697620, Gm14:1697978, Gm14:1699410, Gm14:1700636, Gm14:1701683, Gm14:1701935, Gm14:1702661, Gm14:1702755, Gm14:1704651, Gm14:1704664, Gm14:1712038, Gm14:1712320, Gm14:1712713, Gm14:1712865, Gm14:1712866, Gm14:1713999, Gm14:1719022, Gm14:1728216, Gm14:1731767, Gm14:1735093, Gm14:1735102, Gm14:1736945, Gm14:1743592, Gm14:1748064, Gm14:1749126, Gm14:1754686, Gm14:1757996, Gm14:1760483, Gm14:1783231, Gm14:1783538, Gm14:1783756, Gm14:1786013, Gm14:1787773, Gm14:1792218, Gm14:1799327, Gm14:1799390, Gm14:1799540, Gm14:1800012, Gm14:1800319, Gm14:1811113, Gm14:1811977, Gm14:1824284, Gm14:1837872, Gm14:1837888, Gm14:1851947, Gm14:1858277, Gm14:1861083, Gm14:1887021, Gm14:1903293, Gm14:1910033, Gm14:1919915, Gm14:1934737, Gm14:1946125, Gm14:1958086, Gm14:1986602, Gm14:1987892, Gm14:1988001, Gm14:1989951, Gm14:1991474, Gm14:1997517, Gm14:2006319, Gm14:2017162, Gm14:2019929, Gm14:1701692, Gm14:1702315, Gm14:1702956, Gm14:1703980, Gm14:1706523, Gm14:1711087, Gm14:1712377, Gm14:1714965, Gm14:1727031, Gm14:1727851, Gm14:1728741, Gm14:1729293, Gm14:1730480, Gm14:1730798, Gm14:1731840, Gm14:1732232, Gm14:1732358, Gm14:1732363, Gm14:1732403, Gm14:1735755, Gm14:1735945, Gm14:1743425, Gm14:1744356, Gm14:1746573, Gm14:1748959, Gm14:1750564, Gm14:1753875, Gm14:1754007, Gm14:1755671, Gm14:1756046, Gm14:1760299, Gm14:1760329, Gm14:1761362, Gm14:1766162, Gm14:1780165, Gm14:1780408, Gm14:1782983, Gm14:1789475, Gm14:1799494, Gm14:1799548, Gm14:1799571, Gm14:1811318, Gm14:1825691, Gm14:1834023, Gm14:1841281, Gm14:1846850, Gm14:1887108, Gm14:1887251, Gm14:1935369, Gm14:1969791, Gm14:1981574, Gm14:1981644, Gm14:1983907, Gm14:1986614, Gm14:1986675, Gm14:1987587, Gm14:1988422, Gm14:1988424, Gm14:1988520, Gm14:1988558, Gm14:1989403, Gm14:1991457, Gm14:1991910, Gm14:1992830, Gm14:1993931, Gm14:1997124, Gm14:1998879, Gm14:2004939, Gm14:2005896, Gm14:1698816, Gm14:1701991, Gm14:1710294, Gm14:1710303, Gm14:1711007, Gm14:1711575, Gm14:1713816, Gm14:1728293, Gm14:1729743, Gm14:1730281, Gm14:1730795, Gm14:1732205, Gm14:1744432, Gm14:1751350, Gm14:1755398, Gm14:1756188, Gm14:1761081, Gm14:1761387, Gm14:1762867, Gm14:1765302, Gm14:1777323, Gm14:1779323, Gm14:1780397, Gm14:1800359, Gm14:1803234, Gm14:1811158, Gm14:1825653, Gm14:1869500, Gm14:1876026, Gm14:1876675, Gm14:1876844, Gm14:1876847, Gm14:1879162, Gm14:1884603, Gm14:1904675, Gm14:1944708, Gm14:1954056, Gm14:1954062, Gm14:1967108, Gm14:1972107, Gm14:2006215, Gm14:2011465, Gm14:1704689, Gm14:1711569, Gm14:1713323, Gm14:1728052, Gm14:1729537, Gm14:1732261, Gm14:1732593, Gm14:1735227, Gm14:1744452, Gm14:1754156, Gm14:1755877, Gm14:1756355, Gm14:1759702, Gm14:1780316, Gm14:1801585, Gm14:1810099, Gm14:1810126, Gm14:1810421, Gm14:1823776, Gm14:1875278, Gm14:1875874, Gm14:1902961, Gm14:1910054, Gm14:1949216, Gm14:1957357, Gm14:1957358, Gm14:1960447, Gm14:1980728, Gm14:1984129, Gm14:1992331, Gm14:1993147, Gm14:1995593, Gm14:1995600, Gm14:1996952, Gm14:1997412, Gm14:2004591, Gm14:1645762, Gm14:1713775, Gm14:1716505, Gm14:1729186, Gm14:1729798, Gm14:1732529, Gm14:1753922, Gm14:1759619, Gm14:1759635, Gm14:1760144, Gm14:1761168, Gm14:1771612, Gm14:1777105, Gm14:1778517, Gm14:1779288, Gm14:1779568, Gm14:1804682, Gm14:1810135, Gm14:1825225, Gm14:1828925, Gm14:1846994, Gm14:1848374, Gm14:1874941, Gm14:1875261, Gm14:1875470, Gm14:1879189, Gm14:1881168, Gm14:1923548, Gm14:1923935, Gm14:1955048, Gm14:1955118, Gm14:1955144, Gm14:1959610, Gm14:1960454, Gm14:1967167, Gm14:1970908, Gm14:1976442, Gm14:1981936, Gm14:1982632, Gm14:1982756, Gm14:1984276, Gm14:1994907, Gm14:2013156, Gm14:2019411, Gm14:1711379, Gm14:1713140, Gm14:1727997, Gm14:1744286, Gm14:1757864, Gm14:1759363, Gm14:1765933, Gm14:1767525, Gm14:1767582, Gm14:1768845, Gm14:1775564, Gm14:1778106, Gm14:1778621, Gm14:1780281, Gm14:1780494, Gm14:1805372, Gm14:1809090, Gm14:1810313, Gm14:1812109, Gm14:1812114, Gm14:1824651, Gm14:1875656, Gm14:1877489, Gm14:1878068, Gm14:1903061, Gm14:1950278, Gm14:1950577, Gm14:1950969, Gm14:1970110, Gm14:1982411, Gm14:1983489, Gm14:1983507, Gm14:1983593, Gm14:1993730, Gm14:1993788, Gm14:1993806, Gm14:2006229, Gm14:2015853, Gm14:2359579, Gm14:1579650, Gm14:1764334, Gm14:1764392, Gm14:1764403, Gm14:1767878, Gm14:1805366, Gm14:1825173, Gm14:1879313, Gm14:1886238, Gm14:1899408, Gm14:1960137, Gm14:1971009, Gm14:1983348, Gm14:2011607, Gm14:2012105, Gm14:2340746, Gm14:1767671, Gm14:1771502, Gm14:1771578, Gm14:1803995, Gm14:1805322, Gm14:1809988, Gm14:1825310, Gm14:1888310, Gm14:1889307, Gm14:1957202, Gm14:1981029, Gm14:1981073, Gm14:1981255, Gm14:1992432, Gm14:2010834, Gm14:1759440, Gm14:1775298, Gm14:1775605, Gm14:1804116, Gm14:1804868, Gm14:1806330, Gm14:1806377, Gm14:1889158, Gm14:1899428, Gm14:1926218, Gm14:1928522, Gm14:1957206, Gm14:1959033, Gm14:1969518, Gm14:1975722, Gm14:1981293, Gm14:1983189, Gm14:2013786, Gm14:2014487, Gm14:2191538, Gm14:2191541, Gm14:2191563, Gm14:1711534, Gm14:1773993, Gm14:1808347, Gm14:1808348, Gm14:1812356, Gm14:1812358, Gm14:1874583, Gm14:1971096, Gm14:1975723, Gm14:1976101, Gm14:1998648, Gm14:2006929, Gm14:2013850, Gm14:2014479, Gm14:2014481, Gm14:2101794, Gm14:766045, Gm14:1801323, Gm14:1805026, Gm14:1879302, Gm14:1975774, Gm14:2014429, Gm14:2191662, Gm14:584976, Gm14:2007005, Gm14:1650177, Gm14:1899046, Gm14:806705, Gm14:1976057, Gm14:2747160, and Gm14:1889837. In some examples isolated polynucleotides include a polynucleotide that detects a polymorphism in a polynucleotide selected from the group consisting of Glyma14g02740.1, Glyma14g02750.1, Glyma14g02780.1, Glyma14g02800.1, Glyma14g02820.1, Glyma14g02920.1, Glyma14g03010.1, Glyma14g03030.1, Glyma14g03050.1, Glyma14g03060.1, Glyma14g03100.1, Glyma14g02710.4, and Glyma14g02730.1. In some examples, the polynucleotide comprises a nucleotide sequence selected from the group consisting of SEQ ID NOs: 1-786.

[0023] A soybean plant, germplasm, plant part, or seed comprising at least one marker locus in its genome which confers improved stem canker resistance is provided. In some examples, the soybean plant, germplasm, plant part, or seed comprising said at least one marker locus in its genome which confers improved stem canker resistance is an elite soybean variety. In some examples the soybean plant, germplasm, plant part, or seed comprises an interval on LG B2 as described herein. In some examples soybean plant, germplasm, plant part, or seed comprises at least one marker locus selected from the group consisting of S03188-1, S04492-1, S08256-1, S08257-1, S08231-3, S08231-4, S08241-1, S08251-4, S08251-2, S08255-3, S08255-4, S13721-2, S01591-1, S13722-1, S02987-1, S00802-1, S00777-1, S01799-1, S00288-1, S03923-1, 500341-1, S01718-1, and S04785-1 on LG B2 (ch 14). In some examples the soybean plant, germplasm, plant part, or seed comprises at least one marker locus having a polymorphism selected from the group consisting of Gm14:1088724, Gm14:1197243, Gm14:1594889, Gm14:1650065, Gm14:1727084, Gm14:1727625, Gm14:1747540, Gm14:1748042, Gm14:1748141, Gm14:1755250, Gm14:1755572, Gm14:1788456, Gm14:1923247, Gm14:1925222, Gm14:2129691, Gm14:3468738, Gm14:3726937, Gm14:3727753, Gm14:4204414, Gm14:4946161, Gm14:5028737, Gm14:5096522, Gm14:1706695, Gm14:1723656, Gm14:1723831, Gm14:1724319, Gm14:1738483, Gm14:1739929, Gm14:1850843, Gm14:1853044, Gm14:1863371, Gm14:1863436, Gm14:1863868, Gm14:1914305, Gm14:1936105, Gm14:1939210, Gm14:1940046, Gm14:1942461, Gm14:1942681, Gm14:1700735, Gm14:1702258, Gm14:1715352, Gm14:1718565, Gm14:1722078, Gm14:1722192, Gm14:1723045, Gm14:1724087, Gm14:1724245, Gm14:1724558, Gm14:1724603, Gm14:1725318, Gm14:1726899, Gm14:1738054, Gm14:1784545, Gm14:1785276, Gm14:1793750, Gm14:1842226, Gm14:1850134, Gm14:1850654, Gm14:1850808, Gm14:1851180, Gm14:1851369, Gm14:1851467, Gm14:1851793, Gm14:1852388, Gm14:1852579, Gm14:1855401, Gm14:1867651, Gm14:1867913, Gm14:1867927, Gm14:1910547, Gm14:1910746, Gm14:1910787, Gm14:1911679, Gm14:1916729, Gm14:1916742, Gm14:1919121, Gm14:1934770, Gm14:1935561, Gm14:1935695, Gm14:1935949, Gm14:1936112, Gm14:1936619, Gm14:1936750, Gm14:1936804, Gm14:1936827, Gm14:1937070, Gm14:1937136, Gm14:1937495, Gm14:1938061, Gm14:1940079, Gm14:1940534, Gm14:1940728, Gm14:1940825, Gm14:1941047, Gm14:1941105, Gm14:1944642, Gm14:1700746, Gm14:1706616, Gm14:1706705, Gm14:1706782, Gm14:1708836, Gm14:1709816, Gm14:1712174, Gm14:1717270, Gm14:1722544, Gm14:1723756, Gm14:1725153, Gm14:1725269, Gm14:1726477, Gm14:1731690, Gm14:1738538, Gm14:1739491, Gm14:1739824, Gm14:1785457, Gm14:1787260, Gm14:1796497, Gm14:1840314, Gm14:1842837, Gm14:1850412, Gm14:1850433, Gm14:1850907, Gm14:1851535, Gm14:1852210, Gm14:1859255, Gm14:1860411, Gm14:1909564, Gm14:1910968, Gm14:1935936, Gm14:1936214, Gm14:1936876, Gm14:1939030, Gm14:1939031, Gm14:1939081, Gm14:1940392, Gm14:1941517, Gm14:1989692, Gm14:1989717, Gm14:1992951, Gm14:2003498, Gm14:2004242, Gm14:2004409, Gm14:2006356, Gm14:1698254, Gm14:1698262, Gm14:1698269, Gm14:1701170, Gm14:1701174, Gm14:1701472, Gm14:1701825, Gm14:1702477, Gm14:1702552, Gm14:1702622, Gm14:1704204, Gm14:1705803, Gm14:1706201, Gm14:1706361, Gm14:1706585, Gm14:1706915, Gm14:1708746, Gm14:1713290, Gm14:1718056, Gm14:1718944, Gm14:1719373, Gm14:1723066, Gm14:1726434, Gm14:1726867, Gm14:1727235, Gm14:1728343, Gm14:1730044, Gm14:1731518, Gm14:1736053, Gm14:1738509, Gm14:1738914, Gm14:1739468, Gm14:1739718, Gm14:1739772, Gm14:1749899, Gm14:1785516, Gm14:1785559, Gm14:1786034, Gm14:1786259, Gm14:1793453, Gm14:1796469, Gm14:1797188, Gm14:1798987, Gm14:1800055, Gm14:1842374, Gm14:1850066, Gm14:1850741, Gm14:1850928, Gm14:1852469, Gm14:1854015, Gm14:1854023, Gm14:1859810, Gm14:1860271, Gm14:1862541, Gm14:1867332, Gm14:1868414, Gm14:1919937, Gm14:1935444, Gm14:1936433, Gm14:1937170, Gm14:1937923, Gm14:1938818, Gm14:1939343, Gm14:1939364, Gm14:1939647, Gm14:1939662, Gm14:1939746, Gm14:1939749, Gm14:1940207, Gm14:1940573, Gm14:1941546, Gm14:1945962, Gm14:1946355, Gm14:1990996, Gm14:1991421, Gm14:2001506, Gm14:2001882, Gm14:2003462, Gm14:2003672, Gm14:1697331, Gm14:1698694, Gm14:1700508, Gm14:1701739, Gm14:1701858, Gm14:1702110, Gm14:1702378, Gm14:1706884, Gm14:1706973, Gm14:1708902, Gm14:1711952, Gm14:1712050, Gm14:1712345, Gm14:1717261, Gm14:1722228, Gm14:1722277, Gm14:1723101, Gm14:1724793, Gm14:1725740, Gm14:1726334, Gm14:1727170, Gm14:1730199, Gm14:1736329, Gm14:1736463, Gm14:1736832, Gm14:1737771, Gm14:1738824, Gm14:1738960, Gm14:1743818, Gm14:1756757, Gm14:1760506, Gm14:1778710, Gm14:1783716, Gm14:1784221, Gm14:1786098, Gm14:1797150, Gm14:1797155, Gm14:1799977, Gm14:1811618, Gm14:1812051, Gm14:1824464, Gm14:1839360, Gm14:1843408, Gm14:1850104, Gm14:1851115, Gm14:1851116, Gm14:1855960, Gm14:1858300, Gm14:1860243, Gm14:1860675, Gm14:1866981, Gm14:1869210, Gm14:1872625, Gm14:1902929, Gm14:1913544, Gm14:1914780, Gm14:1935408, Gm14:1936381, Gm14:1936425, Gm14:1939383, Gm14:1988977, Gm14:1989052, Gm14:1990632, Gm14:1990775, Gm14:1991550, Gm14:1999220, Gm14:2003981, Gm14:1697620, Gm14:1697978, Gm14:1699410, Gm14:1700636, Gm14:1701683, Gm14:1701935, Gm14:1702661, Gm14:1702755, Gm14:1704651, Gm14:1704664, Gm14:1712038, Gm14:1712320, Gm14:1712713, Gm14:1712865, Gm14:1712866, Gm14:1713999, Gm14:1719022, Gm14:1728216, Gm14:1731767, Gm14:1735093, Gm14:1735102, Gm14:1736945, Gm14:1743592, Gm14:1748064, Gm14:1749126, Gm14:1754686, Gm14:1757996, Gm14:1760483, Gm14:1783231, Gm14:1783538, Gm14:1783756, Gm14:1786013, Gm14:1787773, Gm14:1792218, Gm14:1799327, Gm14:1799390, Gm14:1799540, Gm14:1800012, Gm14:1800319, Gm14:1811113, Gm14:1811977, Gm14:1824284, Gm14:1837872, Gm14:1837888, Gm14:1851947, Gm14:1858277, Gm14:1861083, Gm14:1887021, Gm14:1903293, Gm14:1910033, Gm14:1919915, Gm14:1934737, Gm14:1946125, Gm14:1958086, Gm14:1986602, Gm14:1987892, Gm14:1988001, Gm14:1989951, Gm14:1991474, Gm14:1997517, Gm14:2006319, Gm14:2017162, Gm14:2019929, Gm14:1701692, Gm14:1702315, Gm14:1702956, Gm14:1703980, Gm14:1706523, Gm14:1711087, Gm14:1712377, Gm14:1714965, Gm14:1727031, Gm14:1727851, Gm14:1728741, Gm14:1729293, Gm14:1730480, Gm14:1730798, Gm14:1731840, Gm14:1732232, Gm14:1732358, Gm14:1732363, Gm14:1732403, Gm14:1735755, Gm14:1735945, Gm14:1743425, Gm14:1744356, Gm14:1746573, Gm14:1748959, Gm14:1750564, Gm14:1753875, Gm14:1754007, Gm14:1755671, Gm14:1756046, Gm14:1760299, Gm14:1760329, Gm14:1761362, Gm14:1766162, Gm14:1780165, Gm14:1780408, Gm14:1782983, Gm14:1789475, Gm14:1799494, Gm14:1799548, Gm14:1799571, Gm14:1811318, Gm14:1825691, Gm14:1834023, Gm14:1841281, Gm14:1846850, Gm14:1887108, Gm14:1887251, Gm14:1935369, Gm14:1969791, Gm14:1981574, Gm14:1981644, Gm14:1983907, Gm14:1986614, Gm14:1986675, Gm14:1987587, Gm14:1988422, Gm14:1988424, Gm14:1988520, Gm14:1988558, Gm14:1989403, Gm14:1991457, Gm14:1991910, Gm14:1992830, Gm14:1993931, Gm14:1997124, Gm14:1998879, Gm14:2004939, Gm14:2005896, Gm14:1698816, Gm14:1701991, Gm14:1710294, Gm14:1710303, Gm14:1711007, Gm14:1711575, Gm14:1713816, Gm14:1728293, Gm14:1729743, Gm14:1730281, Gm14:1730795, Gm14:1732205, Gm14:1744432, Gm14:1751350, Gm14:1755398, Gm14:1756188, Gm14:1761081, Gm14:1761387, Gm14:1762867, Gm14:1765302, Gm14:1777323, Gm14:1779323, Gm14:1780397, Gm14:1800359, Gm14:1803234, Gm14:1811158, Gm14:1825653, Gm14:1869500, Gm14:1876026, Gm14:1876675, Gm14:1876844, Gm14:1876847, Gm14:1879162, Gm14:1884603, Gm14:1904675, Gm14:1944708, Gm14:1954056, Gm14:1954062, Gm14:1967108, Gm14:1972107, Gm14:2006215, Gm14:2011465, Gm14:1704689, Gm14:1711569, Gm14:1713323, Gm14:1728052, Gm14:1729537, Gm14:1732261, Gm14:1732593, Gm14:1735227, Gm14:1744452, Gm14:1754156, Gm14:1755877, Gm14:1756355, Gm14:1759702, Gm14:1780316, Gm14:1801585, Gm14:1810099, Gm14:1810126, Gm14:1810421, Gm14:1823776, Gm14:1875278, Gm14:1875874, Gm14:1902961, Gm14:1910054, Gm14:1949216, Gm14:1957357, Gm14:1957358, Gm14:1960447, Gm14:1980728, Gm14:1984129, Gm14:1992331, Gm14:1993147, Gm14:1995593, Gm14:1995600, Gm14:1996952, Gm14:1997412, Gm14:2004591, Gm14:1645762, Gm14:1713775, Gm14:1716505, Gm14:1729186, Gm14:1729798, Gm14:1732529, Gm14:1753922, Gm14:1759619, Gm14:1759635, Gm14:1760144, Gm14:1761168, Gm14:1771612, Gm14:1777105, Gm14:1778517, Gm14:1779288, Gm14:1779568, Gm14:1804682, Gm14:1810135, Gm14:1825225, Gm14:1828925, Gm14:1846994, Gm14:1848374, Gm14:1874941, Gm14:1875261, Gm14:1875470, Gm14:1879189, Gm14:1881168, Gm14:1923548, Gm14:1923935, Gm14:1955048, Gm14:1955118, Gm14:1955144, Gm14:1959610, Gm14:1960454, Gm14:1967167, Gm14:1970908, Gm14:1976442, Gm14:1981936, Gm14:1982632, Gm14:1982756, Gm14:1984276, Gm14:1994907, Gm14:2013156, Gm14:2019411, Gm14:1711379, Gm14:1713140, Gm14:1727997, Gm14:1744286, Gm14:1757864, Gm14:1759363, Gm14:1765933, Gm14:1767525, Gm14:1767582, Gm14:1768845, Gm14:1775564, Gm14:1778106, Gm14:1778621, Gm14:1780281, Gm14:1780494, Gm14:1805372, Gm14:1809090, Gm14:1810313, Gm14:1812109, Gm14:1812114, Gm14:1824651, Gm14:1875656, Gm14:1877489, Gm14:1878068, Gm14:1903061, Gm14:1950278, Gm14:1950577, Gm14:1950969, Gm14:1970110, Gm14:1982411, Gm14:1983489, Gm14:1983507, Gm14:1983593, Gm14:1993730, Gm14:1993788, Gm14:1993806, Gm14:2006229, Gm14:2015853, Gm14:2359579, Gm14:1579650, Gm14:1764334, Gm14:1764392, Gm14:1764403, Gm14:1767878, Gm14:1805366, Gm14:1825173, Gm14:1879313, Gm14:1886238, Gm14:1899408, Gm14:1960137, Gm14:1971009, Gm14:1983348, Gm14:2011607, Gm14:2012105, Gm14:2340746, Gm14:1767671, Gm14:1771502, Gm14:1771578, Gm14:1803995, Gm14:1805322, Gm14:1809988, Gm14:1825310, Gm14:1888310, Gm14:1889307, Gm14:1957202, Gm14:1981029, Gm14:1981073, Gm14:1981255, Gm14:1992432, Gm14:2010834, Gm14:1759440, Gm14:1775298, Gm14:1775605, Gm14:1804116, Gm14:1804868, Gm14:1806330, Gm14:1806377, Gm14:1889158, Gm14:1899428, Gm14:1926218, Gm14:1928522, Gm14:1957206, Gm14:1959033, Gm14:1969518, Gm14:1975722, Gm14:1981293, Gm14:1983189, Gm14:2013786, Gm14:2014487, Gm14:2191538, Gm14:2191541, Gm14:2191563, Gm14:1711534, Gm14:1773993, Gm14:1808347, Gm14:1808348, Gm14:1812356, Gm14:1812358, Gm14:1874583, Gm14:1971096, Gm14:1975723, Gm14:1976101, Gm14:1998648, Gm14:2006929, Gm14:2013850, Gm14:2014479, Gm14:2014481, Gm14:2101794, Gm14:766045, Gm14:1801323, Gm14:1805026, Gm14:1879302, Gm14:1975774, Gm14:2014429, Gm14:2191662, Gm14:584976, Gm14:2007005, Gm14:1650177, Gm14:1899046, Gm14:806705, Gm14:1976057, Gm14:2747160, and Gm14:1889837. In some examples the soybean plant, germplasm, plant part, or seed comprises at least one marker locus comprising a polynucleotide selected from the group consisting of Glyma14g02740.1, Glyma14g02750.1, Glyma14g02780.1, Glyma14g02800.1, Glyma14g02820.1, Glyma14g02920.1, Glyma14g03010.1, Glyma14g03030.1, Glyma14g03050.1, Glyma14g03060.1, Glyma14g03100.1, Glyma14g02710.4, and Glyma14g02730.1. In some examples the marker locus comprises a polynucleotide encoding a non-synonymous codon change in a polynucleotide selected from the group consisting of Glyma14g02740.1, Glyma14g02750.1, Glyma14g02780.1, Glyma14g02800.1, Glyma14g02820.1, Glyma14g02920.1, Glyma14g03010.1, Glyma14g03030.1, Glyma14g03050.1, Glyma14g03060.1, Glyma14g03100.1, Glyma14g02710.4, and Glyma14g02730.1. In some examples, the soybean plant, germplasm, plant part, or seed further comprises resistance to a herbicidal formulation comprising a compound selected from the group consisting of a metribuzin, a hydroxyphenylpyruvatedioxygenase inhibitor, a phosphanoglycine (including but not limited to a glyphosate), a sulfonylurea, a sulfonamide, an imidazolinone, a bialaphos, a phosphinothricin, a mesotrione, an isoxaflutole, an azafenidin, a butafenacil, a sulfosate, a glufosinate, a dicamba, a 2,4-D, and a protox inhibitor. In some examples, resistance to the herbicidal formulation is conferred by a transgene. In some examples, the plant or germplasm further comprises a trait selected from the group consisting of drought tolerance, stress tolerance, disease resistance, herbicide resistance, enhanced yield, modified oil, modified protein, tolerance to chlorotic conditions, and insect resistance, or any combination thereof. In some examples, the trait is selected from the group consisting of brown stem rot resistance, charcoal rot drought complex resistance, Fusarium resistance, Phytophthora resistance, stem canker resistance, sudden death syndrome resistance, Sclerotinia resistance, Cercospora resistance, Soybean Mosaic Virus resistance, carlavirus resistance, anthracnose resistance, target spot resistance, frogeye leaf spot resistance, soybean cyst nematode resistance, root knot nematode resistance, rust resistance, high oleic content, low linolenic content, aphid resistance, stink bug resistance, and iron chlorosis deficiency tolerance, or any combination thereof. In some examples, one or more of the traits is conferred by one or more transgenes, by one or more native loci, or any combination thereof.

[0024] In another example a method of producing a cleaned soybean seed is provided, the method comprising cleaning a soybean seed comprising at least one marker locus in its genome which confers improved stem canker resistance is provided. In some examples said one or more loci is selected from the group consisting of S03188-1, S04492-1, S08256-1, S08257-1, S08231-3, S08231-4, S08241-1, S08251-4, S08251-2, S08255-3, S08255-4, S13721-2, 501591-1, S13722-1, S02987-1, S00802-1, S00777-1, S01799-1, S00288-1, S03923-1, S00341-1, S01718-1, and S04785-1 on LG B2 (ch 14), and/or Gm14:1088724, Gm14:1197243, Gm14:1594889, Gm14:1650065, Gm14:1727084, Gm14:1727625, Gm14:1747540, Gm14:1748042, Gm14:1748141, Gm14:1755250, Gm14:1755572, Gm14:1788456, Gm14:1923247, Gm14:1925222, Gm14:2129691, Gm14:3468738, Gm14:3726937, Gm14:3727753, Gm14:4204414, Gm14:4946161, Gm14:5028737, Gm14:5096522, Gm14:1706695, Gm14:1723656, Gm14:1723831, Gm14:1724319, Gm14:1738483, Gm14:1739929, Gm14:1850843, Gm14:1853044, Gm14:1863371, Gm14:1863436, Gm14:1863868, Gm14:1914305, Gm14:1936105, Gm14:1939210, Gm14:1940046, Gm14:1942461, Gm14:1942681, Gm14:1700735, Gm14:1702258, Gm14:1715352, Gm14:1718565, Gm14:1722078, Gm14:1722192, Gm14:1723045, Gm14:1724087, Gm14:1724245, Gm14:1724558, Gm14:1724603, Gm14:1725318, Gm14:1726899, Gm14:1738054, Gm14:1784545, Gm14:1785276, Gm14:1793750, Gm14:1842226, Gm14:1850134, Gm14:1850654, Gm14:1850808, Gm14:1851180, Gm14:1851369, Gm14:1851467, Gm14:1851793, Gm14:1852388, Gm14:1852579, Gm14:1855401, Gm14:1867651, Gm14:1867913, Gm14:1867927, Gm14:1910547, Gm14:1910746, Gm14:1910787, Gm14:1911679, Gm14:1916729, Gm14:1916742, Gm14:1919121, Gm14:1934770, Gm14:1935561, Gm14:1935695, Gm14:1935949, Gm14:1936112, Gm14:1936619, Gm14:1936750, Gm14:1936804, Gm14:1936827, Gm14:1937070, Gm14:1937136, Gm14:1937495, Gm14:1938061, Gm14:1940079, Gm14:1940534, Gm14:1940728, Gm14:1940825, Gm14:1941047, Gm14:1941105, Gm14:1944642, Gm14:1700746, Gm14:1706616, Gm14:1706705, Gm14:1706782, Gm14:1708836, Gm14:1709816, Gm14:1712174, Gm14:1717270, Gm14:1722544, Gm14:1723756, Gm14:1725153, Gm14:1725269, Gm14:1726477, Gm14:1731690, Gm14:1738538, Gm14:1739491, Gm14:1739824, Gm14:1785457, Gm14:1787260, Gm14:1796497, Gm14:1840314, Gm14:1842837, Gm14:1850412, Gm14:1850433, Gm14:1850907, Gm14:1851535, Gm14:1852210, Gm14:1859255, Gm14:1860411, Gm14:1909564, Gm14:1910968, Gm14:1935936, Gm14:1936214, Gm14:1936876, Gm14:1939030, Gm14:1939031, Gm14:1939081, Gm14:1940392, Gm14:1941517, Gm14:1989692, Gm14:1989717, Gm14:1992951, Gm14:2003498, Gm14:2004242, Gm14:2004409, Gm14:2006356, Gm14:1698254, Gm14:1698262, Gm14:1698269, Gm14:1701170, Gm14:1701174, Gm14:1701472, Gm14:1701825, Gm14:1702477, Gm14:1702552, Gm14:1702622, Gm14:1704204, Gm14:1705803, Gm14:1706201, Gm14:1706361, Gm14:1706585, Gm14:1706915, Gm14:1708746, Gm14:1713290, Gm14:1718056, Gm14:1718944, Gm14:1719373, Gm14:1723066, Gm14:1726434, Gm14:1726867, Gm14:1727235, Gm14:1728343, Gm14:1730044, Gm14:1731518, Gm14:1736053, Gm14:1738509, Gm14:1738914, Gm14:1739468, Gm14:1739718, Gm14:1739772, Gm14:1749899, Gm14:1785516, Gm14:1785559, Gm14:1786034, Gm14:1786259, Gm14:1793453, Gm14:1796469, Gm14:1797188, Gm14:1798987, Gm14:1800055, Gm14:1842374, Gm14:1850066, Gm14:1850741, Gm14:1850928, Gm14:1852469, Gm14:1854015, Gm14:1854023, Gm14:1859810, Gm14:1860271, Gm14:1862541, Gm14:1867332, Gm14:1868414, Gm14:1919937, Gm14:1935444, Gm14:1936433, Gm14:1937170, Gm14:1937923, Gm14:1938818, Gm14:1939343, Gm14:1939364, Gm14:1939647, Gm14:1939662, Gm14:1939746, Gm14:1939749, Gm14:1940207, Gm14:1940573, Gm14:1941546, Gm14:1945962, Gm14:1946355, Gm14:1990996, Gm14:1991421, Gm14:2001506, Gm14:2001882, Gm14:2003462, Gm14:2003672, Gm14:1697331, Gm14:1698694, Gm14:1700508, Gm14:1701739, Gm14:1701858, Gm14:1702110, Gm14:1702378, Gm14:1706884, Gm14:1706973, Gm14:1708902, Gm14:1711952, Gm14:1712050, Gm14:1712345, Gm14:1717261, Gm14:1722228, Gm14:1722277, Gm14:1723101, Gm14:1724793, Gm14:1725740, Gm14:1726334, Gm14:1727170, Gm14:1730199, Gm14:1736329, Gm14:1736463, Gm14:1736832, Gm14:1737771, Gm14:1738824, Gm14:1738960, Gm14:1743818, Gm14:1756757, Gm14:1760506, Gm14:1778710, Gm14:1783716, Gm14:1784221, Gm14:1786098, Gm14:1797150, Gm14:1797155, Gm14:1799977, Gm14:1811618, Gm14:1812051, Gm14:1824464, Gm14:1839360, Gm14:1843408, Gm14:1850104, Gm14:1851115, Gm14:1851116, Gm14:1855960, Gm14:1858300, Gm14:1860243, Gm14:1860675, Gm14:1866981, Gm14:1869210, Gm14:1872625, Gm14:1902929, Gm14:1913544, Gm14:1914780, Gm14:1935408, Gm14:1936381, Gm14:1936425, Gm14:1939383, Gm14:1988977, Gm14:1989052, Gm14:1990632, Gm14:1990775, Gm14:1991550, Gm14:1999220, Gm14:2003981, Gm14:1697620, Gm14:1697978, Gm14:1699410, Gm14:1700636, Gm14:1701683, Gm14:1701935, Gm14:1702661, Gm14:1702755, Gm14:1704651, Gm14:1704664, Gm14:1712038, Gm14:1712320, Gm14:1712713, Gm14:1712865, Gm14:1712866, Gm14:1713999, Gm14:1719022, Gm14:1728216, Gm14:1731767, Gm14:1735093, Gm14:1735102, Gm14:1736945, Gm14:1743592, Gm14:1748064, Gm14:1749126, Gm14:1754686, Gm14:1757996, Gm14:1760483, Gm14:1783231, Gm14:1783538, Gm14:1783756, Gm14:1786013, Gm14:1787773, Gm14:1792218, Gm14:1799327, Gm14:1799390, Gm14:1799540, Gm14:1800012, Gm14:1800319, Gm14:1811113, Gm14:1811977, Gm14:1824284, Gm14:1837872, Gm14:1837888, Gm14:1851947, Gm14:1858277, Gm14:1861083, Gm14:1887021, Gm14:1903293, Gm14:1910033, Gm14:1919915, Gm14:1934737, Gm14:1946125, Gm14:1958086, Gm14:1986602, Gm14:1987892, Gm14:1988001, Gm14:1989951, Gm14:1991474, Gm14:1997517, Gm14:2006319, Gm14:2017162, Gm14:2019929, Gm14:1701692, Gm14:1702315, Gm14:1702956, Gm14:1703980, Gm14:1706523, Gm14:1711087, Gm14:1712377, Gm14:1714965, Gm14:1727031, Gm14:1727851, Gm14:1728741, Gm14:1729293, Gm14:1730480, Gm14:1730798, Gm14:1731840, Gm14:1732232, Gm14:1732358, Gm14:1732363, Gm14:1732403, Gm14:1735755, Gm14:1735945, Gm14:1743425, Gm14:1744356, Gm14:1746573, Gm14:1748959, Gm14:1750564, Gm14:1753875, Gm14:1754007, Gm14:1755671, Gm14:1756046, Gm14:1760299, Gm14:1760329, Gm14:1761362, Gm14:1766162, Gm14:1780165, Gm14:1780408, Gm14:1782983, Gm14:1789475, Gm14:1799494, Gm14:1799548, Gm14:1799571, Gm14:1811318, Gm14:1825691, Gm14:1834023, Gm14:1841281, Gm14:1846850, Gm14:1887108, Gm14:1887251, Gm14:1935369, Gm14:1969791, Gm14:1981574, Gm14:1981644, Gm14:1983907, Gm14:1986614, Gm14:1986675, Gm14:1987587, Gm14:1988422, Gm14:1988424, Gm14:1988520, Gm14:1988558, Gm14:1989403, Gm14:1991457, Gm14:1991910, Gm14:1992830, Gm14:1993931, Gm14:1997124, Gm14:1998879, Gm14:2004939, Gm14:2005896, Gm14:1698816, Gm14:1701991, Gm14:1710294, Gm14:1710303, Gm14:1711007, Gm14:1711575, Gm14:1713816, Gm14:1728293, Gm14:1729743, Gm14:1730281, Gm14:1730795, Gm14:1732205, Gm14:1744432, Gm14:1751350, Gm14:1755398, Gm14:1756188, Gm14:1761081, Gm14:1761387, Gm14:1762867, Gm14:1765302, Gm14:1777323, Gm14:1779323, Gm14:1780397, Gm14:1800359, Gm14:1803234, Gm14:1811158, Gm14:1825653, Gm14:1869500, Gm14:1876026, Gm14:1876675, Gm14:1876844, Gm14:1876847, Gm14:1879162, Gm14:1884603, Gm14:1904675, Gm14:1944708, Gm14:1954056, Gm14:1954062, Gm14:1967108, Gm14:1972107, Gm14:2006215, Gm14:2011465, Gm14:1704689, Gm14:1711569, Gm14:1713323, Gm14:1728052, Gm14:1729537, Gm14:1732261, Gm14:1732593, Gm14:1735227, Gm14:1744452, Gm14:1754156, Gm14:1755877, Gm14:1756355, Gm14:1759702, Gm14:1780316, Gm14:1801585, Gm14:1810099, Gm14:1810126, Gm14:1810421, Gm14:1823776, Gm14:1875278, Gm14:1875874, Gm14:1902961, Gm14:1910054, Gm14:1949216, Gm14:1957357, Gm14:1957358, Gm14:1960447, Gm14:1980728, Gm14:1984129, Gm14:1992331, Gm14:1993147, Gm14:1995593, Gm14:1995600, Gm14:1996952, Gm14:1997412, Gm14:2004591, Gm14:1645762, Gm14:1713775, Gm14:1716505, Gm14:1729186, Gm14:1729798, Gm14:1732529, Gm14:1753922, Gm14:1759619, Gm14:1759635, Gm14:1760144, Gm14:1761168, Gm14:1771612, Gm14:1777105, Gm14:1778517, Gm14:1779288, Gm14:1779568, Gm14:1804682, Gm14:1810135, Gm14:1825225, Gm14:1828925, Gm14:1846994, Gm14:1848374, Gm14:1874941, Gm14:1875261, Gm14:1875470, Gm14:1879189, Gm14:1881168, Gm14:1923548, Gm14:1923935, Gm14:1955048, Gm14:1955118, Gm14:1955144, Gm14:1959610, Gm14:1960454, Gm14:1967167, Gm14:1970908, Gm14:1976442, Gm14:1981936, Gm14:1982632, Gm14:1982756, Gm14:1984276, Gm14:1994907, Gm14:2013156, Gm14:2019411, Gm14:1711379, Gm14:1713140, Gm14:1727997, Gm14:1744286, Gm14:1757864, Gm14:1759363, Gm14:1765933, Gm14:1767525, Gm14:1767582, Gm14:1768845, Gm14:1775564, Gm14:1778106, Gm14:1778621, Gm14:1780281, Gm14:1780494, Gm14:1805372, Gm14:1809090, Gm14:1810313, Gm14:1812109, Gm14:1812114, Gm14:1824651, Gm14:1875656, Gm14:1877489, Gm14:1878068, Gm14:1903061, Gm14:1950278, Gm14:1950577, Gm14:1950969, Gm14:1970110, Gm14:1982411, Gm14:1983489, Gm14:1983507, Gm14:1983593, Gm14:1993730, Gm14:1993788, Gm14:1993806, Gm14:2006229, Gm14:2015853, Gm14:2359579, Gm14:1579650, Gm14:1764334, Gm14:1764392, Gm14:1764403, Gm14:1767878, Gm14:1805366, Gm14:1825173, Gm14:1879313, Gm14:1886238, Gm14:1899408, Gm14:1960137, Gm14:1971009, Gm14:1983348, Gm14:2011607, Gm14:2012105, Gm14:2340746, Gm14:1767671, Gm14:1771502, Gm14:1771578, Gm14:1803995, Gm14:1805322, Gm14:1809988, Gm14:1825310, Gm14:1888310, Gm14:1889307, Gm14:1957202, Gm14:1981029, Gm14:1981073, Gm14:1981255, Gm14:1992432, Gm14:2010834, Gm14:1759440, Gm14:1775298, Gm14:1775605, Gm14:1804116, Gm14:1804868, Gm14:1806330, Gm14:1806377, Gm14:1889158, Gm14:1899428, Gm14:1926218, Gm14:1928522, Gm14:1957206, Gm14:1959033, Gm14:1969518, Gm14:1975722, Gm14:1981293, Gm14:1983189, Gm14:2013786, Gm14:2014487, Gm14:2191538, Gm14:2191541, Gm14:2191563, Gm14:1711534, Gm14:1773993, Gm14:1808347, Gm14:1808348, Gm14:1812356, Gm14:1812358, Gm14:1874583, Gm14:1971096, Gm14:1975723, Gm14:1976101, Gm14:1998648, Gm14:2006929, Gm14:2013850, Gm14:2014479, Gm14:2014481, Gm14:2101794, Gm14:766045, Gm14:1801323, Gm14:1805026, Gm14:1879302, Gm14:1975774, Gm14:2014429, Gm14:2191662, Gm14:584976, Gm14:2007005, Gm14:1650177, Gm14:1899046, Gm14:806705, Gm14:1976057, Gm14:2747160, and Gm14:1889837, wherein said seed or plant produced therefrom has improved stem canker resistance when compared to a soybean plant or germplasm lacking said one or more loci in its genome. In some examples, the seed or plant produced therefrom comprises a haplotype or marker profile comprising at least two marker loci selected from the group consisting of S03188-1, S04492-1, S08256-1, S08257-1, S08231-3, S08231-4, S08241-1, S08251-4, S08251-2, S08255-3, S08255-4, S13721-2, S01591-1, S13722-1, S02987-1, S00802-1, S00777-1, S01799-1, S00288-1, S03923-1, S00341-1, S01718-1, and S04785-1 on LG B2 (ch 14), and/or Gm14:1088724, Gm14:1197243, Gm14:1594889, Gm14:1650065, Gm14:1727084, Gm14:1727625, Gm14:1747540, Gm14:1748042, Gm14:1748141, Gm14:1755250, Gm14:1755572, Gm14:1788456, Gm14:1923247, Gm14:1925222, Gm14:2129691, Gm14:3468738, Gm14:3726937, Gm14:3727753, Gm14:4204414, Gm14:4946161, Gm14:5028737, Gm14:5096522, Gm14:1706695, Gm14:1723656, Gm14:1723831, Gm14:1724319, Gm14:1738483, Gm14:1739929, Gm14:1850843, Gm14:1853044, Gm14:1863371, Gm14:1863436, Gm14:1863868, Gm14:1914305, Gm14:1936105, Gm14:1939210, Gm14:1940046, Gm14:1942461, Gm14:1942681, Gm14:1700735, Gm14:1702258, Gm14:1715352, Gm14:1718565, Gm14:1722078, Gm14:1722192, Gm14:1723045, Gm14:1724087, Gm14:1724245, Gm14:1724558, Gm14:1724603, Gm14:1725318, Gm14:1726899, Gm14:1738054, Gm14:1784545, Gm14:1785276, Gm14:1793750, Gm14:1842226, Gm14:1850134, Gm14:1850654, Gm14:1850808, Gm14:1851180, Gm14:1851369, Gm14:1851467, Gm14:1851793, Gm14:1852388, Gm14:1852579, Gm14:1855401, Gm14:1867651, Gm14:1867913, Gm14:1867927, Gm14:1910547, Gm14:1910746, Gm14:1910787, Gm14:1911679, Gm14:1916729, Gm14:1916742, Gm14:1919121, Gm14:1934770, Gm14:1935561, Gm14:1935695, Gm14:1935949, Gm14:1936112, Gm14:1936619, Gm14:1936750, Gm14:1936804, Gm14:1936827, Gm14:1937070, Gm14:1937136, Gm14:1937495, Gm14:1938061, Gm14:1940079, Gm14:1940534, Gm14:1940728, Gm14:1940825, Gm14:1941047, Gm14:1941105, Gm14:1944642, Gm14:1700746, Gm14:1706616, Gm14:1706705, Gm14:1706782, Gm14:1708836, Gm14:1709816, Gm14:1712174, Gm14:1717270, Gm14:1722544, Gm14:1723756, Gm14:1725153, Gm14:1725269, Gm14:1726477, Gm14:1731690, Gm14:1738538, Gm14:1739491, Gm14:1739824, Gm14:1785457, Gm14:1787260, Gm14:1796497, Gm14:1840314, Gm14:1842837, Gm14:1850412, Gm14:1850433, Gm14:1850907, Gm14:1851535, Gm14:1852210, Gm14:1859255, Gm14:1860411, Gm14:1909564, Gm14:1910968, Gm14:1935936, Gm14:1936214, Gm14:1936876, Gm14:1939030, Gm14:1939031, Gm14:1939081, Gm14:1940392, Gm14:1941517, Gm14:1989692, Gm14:1989717, Gm14:1992951, Gm14:2003498, Gm14:2004242, Gm14:2004409, Gm14:2006356, Gm14:1698254, Gm14:1698262, Gm14:1698269, Gm14:1701170, Gm14:1701174, Gm14:1701472, Gm14:1701825, Gm14:1702477, Gm14:1702552, Gm14:1702622, Gm14:1704204, Gm14:1705803, Gm14:1706201, Gm14:1706361, Gm14:1706585, Gm14:1706915, Gm14:1708746, Gm14:1713290, Gm14:1718056, Gm14:1718944, Gm14:1719373, Gm14:1723066, Gm14:1726434, Gm14:1726867, Gm14:1727235, Gm14:1728343, Gm14:1730044, Gm14:1731518, Gm14:1736053, Gm14:1738509, Gm14:1738914, Gm14:1739468, Gm14:1739718, Gm14:1739772, Gm14:1749899, Gm14:1785516, Gm14:1785559, Gm14:1786034, Gm14:1786259, Gm14:1793453, Gm14:1796469, Gm14:1797188, Gm14:1798987, Gm14:1800055, Gm14:1842374, Gm14:1850066, Gm14:1850741, Gm14:1850928, Gm14:1852469, Gm14:1854015, Gm14:1854023, Gm14:1859810, Gm14:1860271, Gm14:1862541, Gm14:1867332, Gm14:1868414, Gm14:1919937, Gm14:1935444, Gm14:1936433, Gm14:1937170, Gm14:1937923, Gm14:1938818, Gm14:1939343, Gm14:1939364, Gm14:1939647, Gm14:1939662, Gm14:1939746, Gm14:1939749, Gm14:1940207, Gm14:1940573, Gm14:1941546, Gm14:1945962, Gm14:1946355, Gm14:1990996, Gm14:1991421, Gm14:2001506, Gm14:2001882, Gm14:2003462, Gm14:2003672, Gm14:1697331, Gm14:1698694, Gm14:1700508, Gm14:1701739, Gm14:1701858, Gm14:1702110, Gm14:1702378, Gm14:1706884, Gm14:1706973, Gm14:1708902, Gm14:1711952, Gm14:1712050, Gm14:1712345, Gm14:1717261, Gm14:1722228, Gm14:1722277, Gm14:1723101, Gm14:1724793, Gm14:1725740, Gm14:1726334, Gm14:1727170, Gm14:1730199, Gm14:1736329, Gm14:1736463, Gm14:1736832, Gm14:1737771, Gm14:1738824, Gm14:1738960, Gm14:1743818, Gm14:1756757, Gm14:1760506, Gm14:1778710, Gm14:1783716, Gm14:1784221, Gm14:1786098, Gm14:1797150, Gm14:1797155, Gm14:1799977, Gm14:1811618, Gm14:1812051, Gm14:1824464, Gm14:1839360, Gm14:1843408, Gm14:1850104, Gm14:1851115, Gm14:1851116, Gm14:1855960, Gm14:1858300, Gm14:1860243, Gm14:1860675, Gm14:1866981, Gm14:1869210, Gm14:1872625, Gm14:1902929, Gm14:1913544, Gm14:1914780, Gm14:1935408, Gm14:1936381, Gm14:1936425, Gm14:1939383, Gm14:1988977, Gm14:1989052, Gm14:1990632, Gm14:1990775, Gm14:1991550, Gm14:1999220, Gm14:2003981, Gm14:1697620, Gm14:1697978, Gm14:1699410, Gm14:1700636, Gm14:1701683, Gm14:1701935, Gm14:1702661, Gm14:1702755, Gm14:1704651, Gm14:1704664, Gm14:1712038, Gm14:1712320, Gm14:1712713, Gm14:1712865, Gm14:1712866, Gm14:1713999, Gm14:1719022, Gm14:1728216, Gm14:1731767, Gm14:1735093, Gm14:1735102, Gm14:1736945, Gm14:1743592, Gm14:1748064, Gm14:1749126, Gm14:1754686, Gm14:1757996, Gm14:1760483, Gm14:1783231, Gm14:1783538, Gm14:1783756, Gm14:1786013, Gm14:1787773, Gm14:1792218, Gm14:1799327, Gm14:1799390, Gm14:1799540, Gm14:1800012, Gm14:1800319, Gm14:1811113, Gm14:1811977, Gm14:1824284, Gm14:1837872, Gm14:1837888, Gm14:1851947, Gm14:1858277, Gm14:1861083, Gm14:1887021, Gm14:1903293, Gm14:1910033, Gm14:1919915, Gm14:1934737, Gm14:1946125, Gm14:1958086, Gm14:1986602, Gm14:1987892, Gm14:1988001, Gm14:1989951, Gm14:1991474, Gm14:1997517, Gm14:2006319, Gm14:2017162, Gm14:2019929, Gm14:1701692, Gm14:1702315, Gm14:1702956, Gm14:1703980, Gm14:1706523, Gm14:1711087, Gm14:1712377, Gm14:1714965, Gm14:1727031, Gm14:1727851, Gm14:1728741, Gm14:1729293, Gm14:1730480, Gm14:1730798, Gm14:1731840, Gm14:1732232, Gm14:1732358, Gm14:1732363, Gm14:1732403, Gm14:1735755, Gm14:1735945, Gm14:1743425, Gm14:1744356, Gm14:1746573, Gm14:1748959, Gm14:1750564, Gm14:1753875, Gm14:1754007, Gm14:1755671, Gm14:1756046, Gm14:1760299, Gm14:1760329, Gm14:1761362, Gm14:1766162, Gm14:1780165, Gm14:1780408, Gm14:1782983, Gm14:1789475, Gm14:1799494, Gm14:1799548, Gm14:1799571, Gm14:1811318, Gm14:1825691, Gm14:1834023, Gm14:1841281, Gm14:1846850, Gm14:1887108, Gm14:1887251, Gm14:1935369, Gm14:1969791, Gm14:1981574, Gm14:1981644, Gm14:1983907, Gm14:1986614, Gm14:1986675, Gm14:1987587, Gm14:1988422, Gm14:1988424, Gm14:1988520, Gm14:1988558, Gm14:1989403, Gm14:1991457, Gm14:1991910, Gm14:1992830, Gm14:1993931, Gm14:1997124, Gm14:1998879, Gm14:2004939, Gm14:2005896, Gm14:1698816, Gm14:1701991, Gm14:1710294, Gm14:1710303, Gm14:1711007, Gm14:1711575, Gm14:1713816, Gm14:1728293, Gm14:1729743, Gm14:1730281, Gm14:1730795, Gm14:1732205, Gm14:1744432, Gm14:1751350, Gm14:1755398, Gm14:1756188, Gm14:1761081, Gm14:1761387, Gm14:1762867, Gm14:1765302, Gm14:1777323, Gm14:1779323, Gm14:1780397, Gm14:1800359, Gm14:1803234, Gm14:1811158, Gm14:1825653, Gm14:1869500, Gm14:1876026, Gm14:1876675, Gm14:1876844, Gm14:1876847, Gm14:1879162, Gm14:1884603, Gm14:1904675, Gm14:1944708, Gm14:1954056, Gm14:1954062, Gm14:1967108, Gm14:1972107, Gm14:2006215, Gm14:2011465, Gm14:1704689, Gm14:1711569, Gm14:1713323, Gm14:1728052, Gm14:1729537, Gm14:1732261, Gm14:1732593, Gm14:1735227, Gm14:1744452, Gm14:1754156, Gm14:1755877, Gm14:1756355, Gm14:1759702, Gm14:1780316, Gm14:1801585, Gm14:1810099, Gm14:1810126, Gm14:1810421, Gm14:1823776, Gm14:1875278, Gm14:1875874, Gm14:1902961, Gm14:1910054, Gm14:1949216, Gm14:1957357, Gm14:1957358, Gm14:1960447, Gm14:1980728, Gm14:1984129, Gm14:1992331, Gm14:1993147, Gm14:1995593, Gm14:1995600, Gm14:1996952, Gm14:1997412, Gm14:2004591, Gm14:1645762, Gm14:1713775, Gm14:1716505, Gm14:1729186, Gm14:1729798, Gm14:1732529, Gm14:1753922, Gm14:1759619, Gm14:1759635, Gm14:1760144, Gm14:1761168, Gm14:1771612, Gm14:1777105, Gm14:1778517, Gm14:1779288, Gm14:1779568, Gm14:1804682, Gm14:1810135, Gm14:1825225, Gm14:1828925, Gm14:1846994, Gm14:1848374, Gm14:1874941, Gm14:1875261, Gm14:1875470, Gm14:1879189, Gm14:1881168, Gm14:1923548, Gm14:1923935, Gm14:1955048, Gm14:1955118, Gm14:1955144, Gm14:1959610, Gm14:1960454, Gm14:1967167, Gm14:1970908, Gm14:1976442, Gm14:1981936, Gm14:1982632, Gm14:1982756, Gm14:1984276, Gm14:1994907, Gm14:2013156, Gm14:2019411, Gm14:1711379, Gm14:1713140, Gm14:1727997, Gm14:1744286, Gm14:1757864, Gm14:1759363, Gm14:1765933, Gm14:1767525, Gm14:1767582, Gm14:1768845, Gm14:1775564, Gm14:1778106, Gm14:1778621, Gm14:1780281, Gm14:1780494, Gm14:1805372, Gm14:1809090, Gm14:1810313, Gm14:1812109, Gm14:1812114, Gm14:1824651, Gm14:1875656, Gm14:1877489, Gm14:1878068, Gm14:1903061, Gm14:1950278, Gm14:1950577, Gm14:1950969, Gm14:1970110, Gm14:1982411, Gm14:1983489, Gm14:1983507, Gm14:1983593, Gm14:1993730, Gm14:1993788, Gm14:1993806, Gm14:2006229, Gm14:2015853, Gm14:2359579, Gm14:1579650, Gm14:1764334, Gm14:1764392, Gm14:1764403, Gm14:1767878, Gm14:1805366, Gm14:1825173, Gm14:1879313, Gm14:1886238, Gm14:1899408, Gm14:1960137, Gm14:1971009, Gm14:1983348, Gm14:2011607, Gm14:2012105, Gm14:2340746, Gm14:1767671, Gm14:1771502, Gm14:1771578, Gm14:1803995, Gm14:1805322, Gm14:1809988, Gm14:1825310, Gm14:1888310, Gm14:1889307, Gm14:1957202, Gm14:1981029, Gm14:1981073, Gm14:1981255, Gm14:1992432, Gm14:2010834, Gm14:1759440, Gm14:1775298, Gm14:1775605, Gm14:1804116, Gm14:1804868, Gm14:1806330, Gm14:1806377, Gm14:1889158, Gm14:1899428, Gm14:1926218, Gm14:1928522, Gm14:1957206, Gm14:1959033, Gm14:1969518, Gm14:1975722, Gm14:1981293, Gm14:1983189, Gm14:2013786, Gm14:2014487, Gm14:2191538, Gm14:2191541, Gm14:2191563, Gm14:1711534, Gm14:1773993, Gm14:1808347, Gm14:1808348, Gm14:1812356, Gm14:1812358, Gm14:1874583, Gm14:1971096, Gm14:1975723, Gm14:1976101, Gm14:1998648, Gm14:2006929, Gm14:2013850, Gm14:2014479, Gm14:2014481, Gm14:2101794, Gm14:766045, Gm14:1801323, Gm14:1805026, Gm14:1879302, Gm14:1975774, Gm14:2014429, Gm14:2191662, Gm14:584976, Gm14:2007005, Gm14:1650177, Gm14:1899046, Gm14:806705, Gm14:1976057, Gm14:2747160, and Gm14:1889837. In some examples, the cleaned soybean seed has enhanced yield characteristics when compared to a soybean seed which has not been cleaned. Cleaned soybean seed produced by the methods are also provided.

[0025] In another example a method of producing a treated soybean seed is provided, the method comprising treating a soybean seed comprising at least one marker locus in its genome which confers improved stem canker resistance is provided. In some examples said one or more loci is selected from the group consisting of S03188-1, S04492-1, S08256-1, S08257-1, S08231-3, S08231-4, S08241-1, S08251-4, S08251-2, S08255-3, S08255-4, S13721-2, S01591-1, S13722-1, S02987-1, S00802-1, S00777-1, S01799-1, S00288-1, S03923-1, S00341-1, S01718-1, and S04785-1 on LG B2 (ch 14), wherein said seed or plant produced therefrom has improved stem canker resistance when compared to a soybean plant or germplasm said one or more loci in its genome. In some examples, the seed or plant produced therefrom comprises a haplotype or marker profile comprising at least two marker loci selected from the group consisting of S03188-1, S04492-1, S08256-1, S08257-1, S08231-3, S08231-4, S08241-1, S08251-4, S08251-2, S08255-3, S08255-4, S13721-2, S01591-1, S13722-1, S02987-1, S00802-1, S00777-1, S01799-1, S00288-1, S03923-1, S00341-1, S01718-1, and S04785-1 on LG B2 (ch 14). In some examples, the seed treatment comprises a fungicide, an insecticide, or any combination thereof. In some examples the seed treatment comprises trifloxystrobin, metalaxyl, imidacloprid, Bacillus spp., and any combination thereof. In some examples the seed treatment comprises picoxystrobin, penthiopyrad, cyantraniliprole, chlorantraniliprole, and any combination thereof. In some examples, the seed treatment improves seed germination under normal and/or stress environments, early stand count, vigor, yield, root formation, nodulation, and any combination thereof when compared to a soybean seed which has not been treated. In some examples seed treatment reduces seed dust levels, insect damage, pathogen establishment and/or damage, plant virus infection and/or damage, and any combination thereof. Treated soybean seed produced by the methods are also provided.

[0026] In certain examples, detecting comprises amplifying the marker locus or a portion of the marker locus and detecting the resulting amplified marker amplicon. In particular examples, the amplifying comprises: 1) admixing an amplification primer or amplification primer pair and, optionally at least one nucleic acid probe, with a nucleic acid isolated from the first soybean plant or germplasm, wherein the primer or primer pair and optional probe is complementary or partially complementary to at least a portion of the marker locus and is capable of initiating DNA polymerization by a DNA polymerase using the soybean nucleic acid as a template; and 2) extending the primer or primer pair in a DNA polymerization reaction comprising a DNA polymerase and a template nucleic acid to generate at least one amplicon. In some examples detecting is accomplished by using at least one primer or probe comprising a heterologous detectable label. In particular examples, the detection comprises real time PCR analysis.

[0027] The methods can be used to aid in the selection of breeding plants, lines, and populations containing tolerance to stem canker for use in introgression of this trait into elite soybean germplasm, or germplasm of proven genetic superiority suitable for variety release. Also provided is a method for introgressing a soybean QTL, marker, marker profile, and/or haplotype associated with stem canker tolerance into non-tolerant or less tolerant soybean germplasm. According to the method, markers, marker profiles, and/or haplotypes are used to select soybean plants containing the improved tolerance trait. Plants so selected can be used in a soybean breeding program. Through the process of introgression, the QTL, marker, marker profile, and/or haplotype associated with an improved stem canker tolerance is introduced from plants identified using marker-assisted selection (MAS) to other plants. According to the method, agronomically desirable plants and seeds can be produced containing the QTL, marker, marker profile, and/or haplotype associated with a stem canker tolerance from germplasm containing the QTL, marker, marker profile, and/or haplotype.

[0028] Also provided herein is a method for producing a soybean plant adapted for conferring improved stem canker tolerance. First, donor soybean plants for a parental line containing one or more tolerance QTL, marker, haplotype, and/or marker profile are selected. According to the method, selection can be accomplished via MAS as explained herein. Selected plant material may represent, among others, an inbred line, a hybrid line, a heterogeneous population of soybean plants, or an individual plant. According to techniques well known in the art of plant breeding, this donor parental line is crossed with a second parental line. In some examples, the second parental line is a high yielding line. This cross produces a segregating plant population composed of genetically heterogeneous plants. Plants of the segregating plant population are screened for one or more of the tolerance QTL, marker, haplotype, and/or marker profile. Further breeding may include, among other techniques, additional crosses with other lines, with hybrids, backcrossing, or self-crossing. The result is a line of soybean plants that has improved tolerance to stem canker and optionally also has other desirable traits from one or more other soybean lines.

[0029] Soybean plants, germplasm, seeds, tissue cultures, variants and mutants having improved stem canker tolerance produced by the foregoing methods are provided. Also provided are isolated nucleic acids, kits, and systems useful for the identification and selection methods disclosed herein.

[0030] It is to be understood that this invention is not limited to particular embodiments, which can, of course, vary. It is also to be understood that the terminology used herein is for the purpose of describing particular embodiments only, and is not intended to be limiting. Further, all publications referred to herein are incorporated by reference for the purpose cited to the same extent as if each was specifically and individually indicated to be incorporated by reference herein.

### DEFINITIONS

[0031] As used in this specification and the appended claims, terms in the singular and the singular forms “a,” “an,” and “the,” for example, include plural referents unless the content clearly dictates otherwise. Thus, for example, reference to “plant,” “the plant,” or “a plant” also includes a plurality of plants; also, depending on the context, use of the term “plant” can also include genetically similar or identical progeny of that plant; use of the term “a nucleic acid” optionally includes, as a practical matter, many copies of that nucleic acid molecule; similarly, the term “probe” optionally (and typically) encompasses many similar or identical probe molecules.

[0032] As used herein, the terms “comprises,” “comprising,” “includes,” “including,” “has,” “having,” “contains”, “containing,” “characterized by” or any other variation thereof, are intended to cover a non-exclusive inclusion, subject to any limitation explicitly indicated. For example, a composition, mixture, process, method, article, or apparatus that comprises a list of elements is not necessarily limited to only those elements but may include other elements not expressly listed or inherent to such composition, mixture, process, method, article, or apparatus.

[0033] The transitional phrase “consisting of” excludes any element, step, or ingredient not specified. In a claim, such would close the claim to the inclusion of materials other than those recited except for impurities ordinarily associated therewith. When the phrase “consisting of” appears in a clause of the body of a claim, rather than immediately following the preamble, it limits only the element set forth in that clause; other elements are not excluded from the claim as a whole. The transitional phrase “consisting essentially of” is used to define a composition, method or apparatus that includes materials, steps, features, components, or elements, in addition to those literally disclosed, provided that these additional materials, steps, features, components, or elements do not materially affect the basic and novel characteristic(s) of the claimed invention.

[0034] Certain definitions used in the specification and claims are provided below. In order to provide a clear and consistent understanding of the specification and claims, including the scope to be given such terms, the following definitions are provided:

[0035] “Allele” means any of one or more alternative forms of a genetic sequence. In a diploid cell or organism, the two alleles of a given sequence typically occupy corresponding loci on a pair of homologous chromosomes. With regard to a SNP marker, allele refers to the specific nucleotide base present at that SNP locus in that individual plant. A favorable allele is an allele correlated with the preferred phenotype. A favorable allele is typically denoted as a nucleotide variant on one strand at a specified position of a polynucleotide, but clearly includes the nucleotide at the corresponding position on the complementary strand of the polynucleotide. For example, a favorable allele “T” at position 10 of polynucleotide X includes the “A” at the corresponding position of the other strand of polynucleotide X based nucleotide base pairing.

[0036] The term “amplifying” in the context of nucleic acid amplification is any process whereby additional copies of a selected nucleic acid (or a transcribed form thereof) are produced. An “amplicon” is an amplified nucleic acid, e.g., a nucleic acid that is produced by amplifying a template nucleic acid by any available amplification method.

[0037] “Backcrossing” is a process in which a breeder crosses a progeny variety back to one of the parental genotypes one or more times.

[0038] The term “chromosome segment” designates a contiguous linear span of genomic DNA that resides in planta on a single chromosome. “Chromosome interval” refers to a chromosome segment defined by specific flanking marker loci.

[0039] “Cultivar” and “variety” are used synonymously and mean a group of plants within a species (e.g., Glycine max) that share certain genetic traits that separate them from other possible varieties within that species. Soybean cultivars are inbred lines produced after several generations of self-pollinations. Individuals within a soybean cultivar are homogeneous, nearly genetically identical, with most loci in the homozygous state.

[0040] An “elite line” is an agronomically superior line that has resulted from many cycles of breeding and selection for superior agronomic performance. Numerous elite lines are available and known to those of skill in the art of soybean breeding.

[0041] An “elite population” is an assortment of elite individuals or lines that can be used to represent the state of the art in terms of agronomically superior genotypes of a given crop species, such as soybean.

[0042] An “exotic soybean strain” or an “exotic soybean germplasm” is a strain or germplasm derived from a soybean not belonging to an available elite soybean line or strain of germplasm. In the context of a cross between two soybean plants or strains of germplasm, an exotic germplasm is not closely related by descent to the elite germplasm with which it is crossed. Most commonly, the exotic germplasm is not derived from any known elite line of soybean, but rather is selected to introduce novel genetic elements (typically novel alleles) into a breeding program.

[0043] A “genetic map” is a description of genetic association or linkage relationships among loci on one or more chromosomes (or linkage groups) within a given species, generally depicted in a diagrammatic or tabular form.

[0044] “Genotype” refers to the genetic constitution of a cell or organism.

[0045] “Germplasm” means the genetic material that comprises the physical foundation of the hereditary qualities of an organism. As used herein, germplasm includes seeds and living tissue from which new plants may be grown; or, another plant part, such as leaf, stem, pollen, or cells, that may be cultured into a whole plant. Germplasm resources provide sources of genetic traits used by plant breeders to improve commercial cultivars.

[0046] “Stem canker resistance” and “stem canker tolerance” are used interchangeably to classify plants that when exposed to or inoculated with a stem canker pathogen will show reduced damage or symptoms as compared to an appropriate control plant treated under substantially identical conditions.

[0047] An individual is “homozygous” if the individual has only one type of allele at a given locus (e.g., a diploid individual has a copy of the same allele at a locus for each of two homologous chromosomes). An individual is “heterozygous” if more than one allele type is present at a given locus (e.g., a diploid individual with one copy each of two different alleles). The term “homogeneity” indicates that members of a group have the same genotype at one or more specific loci. In contrast, the term “heterogeneity” is used to indicate that individuals within the group differ in genotype at one or more specific loci.

[0048] “Introgression” means the entry or introduction of a gene, a transgene, a QTL, a marker, a haplotype, a marker profile, a trait, a trait locus, or a chromosomal segment from the genome of one plant into the genome of another plant.

[0049] The terms “label” and “detectable label” refer to a molecule capable of detection. A detectable label can also include a combination of a reporter and a quencher, such as are employed in FRET probes or TaqMan™ probes. The term “reporter” refers to a substance or a portion thereof which is capable of exhibiting a detectable signal, which signal can be suppressed by a quencher. The detectable signal of the reporter is, e.g., fluorescence in the detectable range. The term “quencher” refers to a substance or portion thereof which is capable of suppressing, reducing, inhibiting, etc., the detectable signal produced by the reporter. As used herein, the terms “quenching” and “fluorescence energy transfer” refer to the process whereby, when a reporter and a quencher are in close proximity, and the reporter is excited by an energy source, a substantial portion of the energy of the excited state nonradiatively transfers to the quencher where it either dissipates nonradiatively or is emitted at a different emission wavelength than that of the reporter.

[0050] A “line” or “strain” is a group of individuals of identical parentage that are generally inbred to some degree and that are generally homozygous and homogeneous at most loci (isogenic or near isogenic). A “subline” refers to an inbred subset of descendents that are genetically distinct from other similarly inbred subsets descended from the same progenitor. Traditionally, a subline has been derived by inbreeding the seed from an individual soybean plant selected at the F3 to F5 generation until the residual segregating loci are homozygous (fixed) across most or all loci. Commercial soybean varieties (or lines) are typically produced by aggregating (bulking) the self-pollinated progeny of a single F3 to F5 plant from a controlled cross between 2 genetically different parents. While the variety typically appears uniform, the self-pollinating variety derived from the selected plant eventually (e.g., F8) becomes a mixture of homozygous plants that can vary in genotype at any locus that was heterozygous in the originally selected F3 to F5 plant. Marker-based sublines that differ from each other based on qualitative polymorphism at the DNA level at one or more specific marker loci are derived by genotyping a sample of seed derived from individual self-pollinated progeny derived from a selected F3-F5 plant. The seed sample can be genotyped directly as seed, or as plant tissue grown from such a seed sample. Optionally, seed sharing a common genotype at the specified locus (or loci) are bulked providing a subline that is genetically homogenous at identified loci important for a trait of interest (e.g., yield, tolerance, etc.).

[0051] “Linkage” refers to the tendency for alleles to segregate together more often than expected by chance if their transmission was independent. Typically, linkage refers to loci on the same chromosome that do not segregate independently during meiosis. Genetic recombination occurs with an assumed random frequency over the entire genome. Genetic maps are constructed by measuring the frequency of recombination between pairs of traits or markers, the lower the frequency of recombination, the greater the degree of linkage. A 1/100 probability of recombination per generation is defined as a map distance of 1.0 centiMorgan (1.0 cM).

[0052] With regard to physical position on a chromosome, closely linked markers can be separated, for example, by about 1 megabase (Mb; 1 million nucleotides), about 500 kilobases (Kb; 1000 nucleotides), about 400 Kb, about 300 Kb, about 200 Kb, about 100 Kb, about 50 Kb, about 25 Kb, about 10 Kb, about 5 Kb, about 4 Kb, about 3 Kb, about 2 Kb, about 1 Kb, about 500 nucleotides, about 250 nucleotides, or less.

[0053] When referring to the relationship between two genetic elements, such as a genetic element contributing to tolerance and a proximal marker, “coupling” phase linkage indicates the state where the “favorable” allele at the tolerance locus is physically associated on the same chromosome strand as the “favorable” allele of the respective linked marker locus. In coupling phase, both favorable alleles are inherited together by progeny that inherit that chromosome strand. In “repulsion” phase linkage, the “favorable” allele at the locus of interest (e.g., a QTL for tolerance) is physically linked with an “unfavorable” allele at the proximal marker locus, and the two “favorable” alleles are not inherited together (i.e., the two loci are “out of phase” with each other).

[0054] “Linkage disequilibrium” refers to cases wherein alleles tend to remain together when segregating from parents to offspring, with a greater frequency than expected from their individual frequencies. Linkage disequilibrium indicates a non-random association of alleles.

[0055] “Linkage group” refers to traits or markers that generally co-segregate. A linkage group generally corresponds to a chromosomal region containing genetic material that encodes the traits or markers.

[0056] “Locus” is a defined segment of DNA.

[0057] A “map location,” a “map position,” or, “relative map position” is an assigned location on a genetic map relative to associated genetic markers where a specified marker can be found within a given species. Map positions are generally provided in centimorgans (cM), unless otherwise indicated, genetic positions provided are based on the Glycine max consensus map v 4.0 as provided by Hyten et al. (2010) Crop Sci 50:960-968. A “physical position” or “physical location” is the position, typically in nucleotide bases, of a particular nucleotide, such as a SNP nucleotide, on the chromosome. Unless otherwise indicated, the physical position within the soybean genome provided is based on the Glyma 1.0 genome sequence described in Schmutz et al. (2010) Nature 463:178-183, available from the Phytozome website (phytozome-dot-net/soybean), and includes the corresponding coordinates in future revisions of the soybean genome assembly.

[0058] “Mapping” is the process of defining the linkage relationships of loci through the use of genetic markers, populations segregating for the markers, and standard genetic principles of recombination frequency.

[0059] “Marker” or “molecular marker” is a term used to denote a nucleic acid or amino acid sequence that is sufficiently unique to characterize a specific locus on the genome. Any detectable polymorphic trait can be used as a marker so long as it is inherited differentially. Preferably, the marker also exhibits linkage disequilibrium with a phenotypic trait of interest.

[0060] “Marker assisted selection” refers to the process of selecting a desired trait or traits in a plant or plants by detecting one or more nucleic acids from the plant, where the nucleic acid is linked to the desired trait, and then selecting the plant or germplasm possessing those one or more nucleic acids.

[0061] “Marker profile” denotes a combination of particular alleles present within a particular plant's genome at two or more marker loci which are not necessarily linked, including but not limited to instances when two or more loci are on two or more different linkage groups. In certain other examples a plant's marker profile comprises one or more haplotypes. In some examples, the marker profile encompasses two or more loci for the same trait, such as stem canker resistance. In other examples, the marker profile encompasses two or more loci associated with two or more traits of interest, such as stem canker resistance and a second trait of interest.

[0062] “Haplotype” refers to a combination of particular alleles present within a particular plant's genome at two or more marker loci, for instance at two or more loci on a particular linkage group or chromosome. A haplotype can include 2, 3, 4, 5, 6, 7, 8, 9, 10, 11, 12, 13, 14, 15, 16, 17, 18, 19, 20, or more marker loci used to define a haplotype for a particular plant.

[0063] “Maturity Group” is an agreed-on industry division of groups of varieties, based on the zones in which they are adapted primarily according to day length and/or latitude. Soybean varieties are grouped into 13 maturity groups, depending on the climate and latitude for which they are adapted. Soybean maturities are divided into relative maturity groups (denoted as 000, 00, 0, I, II, III, IV, V, VI, VII, VIII, IX, X, or 000, 00, 0, 1, 2, 3, 4, 5, 6, 7, 8, 9, 10). These maturity groups are given numbers, with numbers 000, 00, 0 and 1 typically being adapted to Canada and the northern United States, groups VII, VIII and IX being grown in the southern regions, and Group X is tropical. Within a maturity group are sub-groups. A sub-group is a tenth of a relative maturity group (for example 1.3 would indicate a group 1 and subgroup 3). Within narrow comparisons, the difference of a tenth of a relative maturity group equates very roughly to a day difference in maturity at harvest.

[0064] A “mixed defined plant population” refers to a plant population containing many different families and lines of plants. Typically, the defined plant population exhibits a quantitative variability for a phenotype that is of interest. “Multiple plant families” refers to different families of related plants within a population.

[0065] The term “plant” includes reference to an immature or mature whole plant, including a plant from which seed or grain or anthers have been removed. Seed or an embryo that will produce the plant is also considered to be the plant.

[0066] “Plant parts” means any portion or piece of a plant, including leaves, stems, buds, roots, root tips, anthers, seed, grain, embryo, pollen, ovules, flowers, cotyledons, hypocotyls, pods, flowers, shoots, stalks, tissues, tissue cultures, cells, and the like.

[0067] “Polymorphism” means a change or difference between two related nucleic acids. A “nucleotide polymorphism” refers to a nucleotide that is different in one sequence when compared to a related sequence when the two nucleic acids are aligned for maximal correspondence. Polymorphism is inclusive of one or more nucleotide changes such as substitutions, deletions, and additions.

[0068] “Polynucleotide,” “polynucleotide sequence,” “nucleic acid sequence,” “nucleic acid fragment,” and “oligonucleotide” are used interchangeably herein to indicate a polymer of nucleotides that is single- or multi-stranded, that optionally contains synthetic, non-natural, or altered RNA or DNA nucleotide bases. A DNA polynucleotide may be comprised of one or more strands of cDNA, genomic DNA, synthetic DNA, or mixtures thereof.

[0069] “Primer” refers to an oligonucleotide which is capable of acting as a point of initiation of nucleic acid synthesis or replication along a complementary strand when placed under conditions in which synthesis of a complementary strand is catalyzed by a polymerase. Typically, primers are about 10 to 30 nucleotides in length, but longer or shorter sequences can be employed. Primers may be provided in double-stranded form, though the single-stranded form is more typically used. A primer can further contain a detectable label, for example a 5′ end label.

[0070] “Probe” refers to an oligonucleotide that is complementary (though not necessarily fully complementary) to a polynucleotide of interest and forms a duplexed structure by hybridization with at least one strand of the polynucleotide of interest. Typically, probes are oligonucleotides from 10 to 50 nucleotides in length, but longer or shorter sequences can be employed. A probe can further contain a detectable label.

[0071] “Quantitative trait locus” or “QTL” refer to the genetic elements controlling a quantitative trait.

[0072] “Recombination frequency” is the frequency of a crossing over event (recombination) between two genetic loci. Recombination frequency can be observed by following the segregation of markers and/or traits during meiosis.

[0073] “Tolerance,” “improved tolerance,” “resistance,” and “improved resistance” are used interchangeably herein and refer to any type of increase in resistance or tolerance, or any type of decrease in susceptibility. A “tolerant plant” or “tolerant plant variety” need not possess absolute or complete tolerance. Instead, a “tolerant plant,” “tolerant plant variety,” or a plant or plant variety with “improved tolerance” will have a level of resistance or tolerance which is higher than that of a comparable susceptible or less tolerant plant or variety.

[0074] “Self crossing” or “self pollination” or “selfing” is a process through which a breeder crosses a plant with itself; for example, a second generation hybrid F2 with itself to yield progeny designated F2:3.

[0075] “SNP” or “single nucleotide polymorphism” means a sequence variation that occurs when a single nucleotide (A, T, C, or G) in the genome sequence is altered or variable. “SNP markers” exist when SNPs are mapped to sites on the soybean genome.

[0076] The term “yield” refers to the productivity per unit area of a particular plant product of commercial value. For example, yield of soybean is commonly measured in bushels of seed per acre or metric tons of seed per hectare per season. Yield is affected by both genetic and environmental factors. Yield is the final culmination of all agronomic traits.

[0077] An “isolated” or “purified” polynucleotide or polypeptide, or biologically active portion thereof, is substantially or essentially free from components that normally accompany or interact with the polynucleotide or polypeptide as found in its naturally occurring environment. Typically, an “isolated” polynucleotide is free of sequences (optimally protein encoding sequences) that naturally flank the polynucleotide (i.e., sequences located at the 5′ and 3′ ends of the polynucleotide) in the genomic DNA of the organism from which the polynucleotide is derived. For example, the isolated polynucleotide can contain less than about 5 kb, 4 kb, 3 kb, 2 kb, 1 kb, 0.5 kb, or 0.1 kb of nucleotide sequence that naturally flank the polynucleotide in genomic DNA of the cell from which the polynucleotide is derived. A polypeptide that is substantially free of cellular material includes preparations of polypeptides having less than about 30%, 20%, 10%, 5%, or 1% (by dry weight) of contaminating protein, culture media, or other chemical components.

[0078] Stem Canker is a fungal disease of soybeans characterized by two distinct disease isolates, Southern Stem Canker (Diaporthe phaseolorum var. meridionalis) and Northern Stem Canker (Diaporthe phaseolorum var. caulivora). The southern isolate is considered endemic to the entire United States southern soybean growing region. After its first occurrence in the United States in 1973, Southern Stem Canker caused widespread crop damage during the early 1980's, with losses up to 100% in severely affected fields. Currently, there does not appear to be any overlap in the geographical regions impacted by northern versus southern pathogen isolates. Stem canker is now a worldwide problem, with occurrences in at least the U.S., Europe, Brazil and Argentina. Stem canker infection occurs during the early vegetative growth period (V1 to V5). Like many other fungal scorch diseases, leaf symptoms generally don't appear until the late reproductive growth stages (R3 to R6). Stem canker symptoms begin as reddish brown lesions on the stem, generally centered on a leaf node and concentrated on one side of the stem. As the disease progresses, cankers will enlarge longitudinally, turn dark brown to black in color, become slightly sunken and eventually completely girdle stems. At this point, the free flow of nutrients and water is disrupted in the plant. Cankers, which coalesce, may be confused with stem discoloration caused by Phytophthora. However, stem canker usually forms higher on the plant than does Phytophthora. Severe stem canker can result in premature plant death. Foliage of diseased plants initially exhibits interveinal yellowing. This is followed by tissue death between the veins. Eventually, leaves die and usually remain attached to leaf stems (petioles).

[0079] As the external lesions increase in size, the internal pith area of the stem is slowly degraded. In some cases, the external symptoms do not accurately reflect the amount of lesion growth and internal damage to the stem. Some instances of stem canker can result in plant lodging. Upon entering reproductive growth, plants can begin to exhibit interveinal chlorotic and necrotic leaf symptoms. These leaf symptoms are caused in part by a phytotoxin that is exuded by the pathogen in the stem. Upon plant death, the leaves generally remain attached to the stem. Damage due to stem canker primarily results from premature plant death, along with reductions in seed number and seed size.

[0080] Losses from Southern Stem Canker can be minimized by use of resistant cultivars and delayed planting of problem fields. Conventional tillage can also offer some benefits due to the fact that the pathogen over-winters in crop debris, which can serve as a source of infection for subsequent growing seasons. The pathogen can also be associated with seed. No seed treatments are suggested for the control of stem canker. Production practices that reduce the chances of stress conditions during the growing season can help mitigate yield reductions from stem canker. Additionally, foliar-applied fungicides are not recommended stem canker control. The suggested timing for using foliar-applied fungicides to control other diseases appears to have little effect on reducing stem canker. Use of varieties having resistance to stem canker is the best option to protect against crop loss.

[0081] A soybean plant, germplasm, plant part, or seed further comprising resistance to a herbicidal formulation is provided. For example, the herbicidal formulation can comprise a compound selected from the group consisting of a metribuzin, glyphosate, a hydroxyphenylpyruvatedioxygenase (HPPD) inhibitor, a sulfonamide, a sulfonylurea, an imidazolinone, a bialaphos, a phosphinothricin, a mesotrione, an isoxaflutole, an azafenidin, a butafenacil, a sulfosate, a glufosinate, a dicamba, a 2,4-D, and a protox inhibitor. In some examples, resistance to an herbicidal formulation is conferred by a transgene. In other examples, resistance to an herbicide or herbicidal formulation is conferred as a naturally occurring (native) trait.

[0082] Glyphosate resistance can be conferred from genes including but not limited to EPSPS, GAT, GOX, and the like, such as described in U.S. Pat. Nos. 6,248,876; 5,627,061; 5,804,425; 5,633,435; 5,145,783; 4,971,908; 5,312,910; 5,188,642; 4,940,835; 5,866,775; 6,225,114; 6,130,366; 5,310,667; 4,535,060; 4,769,061; 5,633,448; 5,510,471; RE36,449; RE37,287 E; 5,491,288; 5,776,760; 5,463,175; 8,044,261; 7,527,955; 7,666,643; 7,998,703; 7,951,995; 7,968,770; 8,088,972, 7,863,503; and US20030083480; WO 97/04103; WO 00/66746; WO 01/66704; and WO 00/66747, which are each incorporated herein by reference in their entireties for all purposes. Additionally, glyphosate tolerant plants can be generated through the selection of naturally occurring mutations that impart tolerance to glyphosate.

[0083] HPPD resistance can be conferred by genes including exemplary sequences disclosed in U.S. Pat. Nos. 6,245,968; 6,268,549; and 6,069,115; and WO 99/23886, which are each incorporated herein by reference in their entireties for all purposes. Mutant hydroxyphenylpyruvatedioxygenases having this activity are also known. For further examples see US20110185444 and US20110185445.

[0084] Resistance to auxins, such as 2,4-D or dicamba, can be provided by polynucleotides as described, for example, in WO2005/107437, US20070220629, and U.S. Pat. No. 7,838,733 and in Herman et al. (2005) J. Biol. Chem. 280:24759-24767, each which is herein incorporated by reference.

[0085] Resistance to PPO-inhibiting herbicides can be provided as described in U.S. Pat. Nos. 6,288,306; 6,282,837; and 5,767,373; and WO 01/12825, each of which is herein incorporated by reference. Plants containing such polynucleotides can exhibit improved tolerance to any of a variety of herbicides which target the protox enzyme. Resistance can also be conferred as described in US20100186131; US20110185444; US20100024080, each of which is herein incorporated by reference.

[0086] The development of plants containing an exogenous phosphinothricin acetyltransferase which confers resistance to glufosinate, bialaphos, or phosphinothricin is described, for example, in U.S. Pat. Nos. 5,969,213; 5,489,520; 5,550,318; 5,874,265; 5,919,675; 5,561,236; 5,648,477; 5,646,024; 6,177,616; and 5,879,903, which are each incorporated herein by reference in their entireties for all purposes. Mutant phosphinothricin acetyltransferase having this activity are also known in the art.

[0087] In some examples, the plant or germplasm further comprises a trait selected from the group consisting of drought tolerance, stress tolerance, disease resistance, herbicide resistance, enhanced yield, modified oil, modified protein, tolerance to chlorotic conditions, and insect resistance, or any combination thereof. In some examples, the trait is selected from the group consisting of brown stem rot resistance, charcoal rot drought complex resistance, Fusarium resistance, Phytophthora resistance, stem canker resistance, sudden death syndrome resistance, Sclerotinia resistance, Cercospora resistance, anthracnose resistance, target spot resistance, frogeye leaf spot resistance, soybean cyst nematode resistance, root knot nematode resistance, rust resistance, high oleic content, low linolenic content, aphid resistance, stink bug resistance, and iron chlorosis deficiency tolerance, or any combination thereof. In some examples, one or more of the traits is conferred by one or more transgenes, by one or more native loci, or any combination thereof. Examples of markers and loci conferring improved iron chlorosis deficiency tolerance are disclosed in US20110258743, U.S. Pat. No. 7,582,806, and U.S. Pat. No. 7,977,533, each of which is herein incorporated by reference. Various disease resistance loci and markers are disclosed, for example, in WO1999031964, U.S. Pat. No. 5,948,953, U.S. Pat. No. 5,689,035, US20090170112, US20090172829, US20090172830, US20110271409, US20110145953, U.S. Pat. No. 7,642,403, U.S. Pat. No. 7,919,675, US20110131677, U.S. Pat. No. 7,767,882, U.S. Pat. No. 7,910,799, US20080263720, U.S. Pat. No. 7,507,874, US20040034890, US20110055960, US20110185448, US20110191893, US20120017339, U.S. Pat. No. 7,250,552, U.S. Pat. No. 7,595,432, U.S. Pat. No. 7,790,949, U.S. Pat. No. 7,956,239, U.S. Pat. No. 7,968,763, each of which is herein incorporated by reference. Markers and loci conferring improved yield are provided, for example, in U.S. Pat. No. 7,973,212 and WO2000018963, each of which is herein incorporated by reference. Markers and loci conferring improved resistance to insects are disclosed in, for example, US20090049565, U.S. Pat. No. 7,781,648, US20100263085, U.S. Pat. No. 7,928,286, U.S. Pat. No. 7,994,389, and WO2011116131, each of which is herein incorporated by reference. Markers and loci for modified soybean oil content or composition are disclosed in, for example, US20120028255 and US20110277173, each of which is herein incorporated by reference. Methods and compositions to modified soybean oil content are described in, for example, WO2008147935, U.S. Pat. No. 8,119,860; U.S. Pat. No. 8,119,784; U.S. Pat. No. 8,101,189; U.S. Pat. No. 8,058,517; U.S. Pat. No. 8,049,062; U.S. Pat. No. 8,124,845; U.S. Pat. No. 7,790,959; U.S. Pat. No. 7,531,718; U.S. Pat. No. 7,504,563; and U.S. Pat. No. 6,949,698, each of which is herein incorporated by reference. Markers and loci conferring tolerance to nematodes are disclosed in, for example, US20090064354, US20090100537, US20110083234, US20060225150, US20110083224, U.S. Pat. No. 5,491,081, U.S. Pat. No. 6,162,967, U.S. Pat. No. 6,538,175, U.S. Pat. No. 7,872,171, U.S. Pat. No. 6,096,944, and U.S. Pat. No. 6,300,541, each of which is herein incorporated by reference. Resistance to nematodes may be conferred using a transgenic approach as described, for example, in U.S. Pat. No. 6,284,948 and U.S. Pat. No. 6,228,992, each of which is herein incorporated by reference. Plant phenotypes can be modified using isopentyl transferase polynucleotides as described, for example, in U.S. Pat. No. 7,553,951 and U.S. Pat. No. 7,893,236, each of which is herein incorporated by reference.

[0088] Soybean plants, germplasm, cells, or seed may be evaluated by any method to determine the presence of a polynucleotide and/or polypeptide associated with tolerance to stem canker. Methods include phenotypic evaluations, genotypic evaluations, or combinations thereof. The progeny plants may be evaluated in subsequent generations for stem canker resistance, and other desirable traits. Resistance to stem canker may be evaluated by exposing plants, cells, or seed to one or more appropriate stem canker pathogens and evaluating injury. Genotypic evaluation of the plants, germplasm, cells or seeds includes using techniques such as isozyme electrophoresis, restriction fragment length polymorphisms (RFLPs), randomly amplified polymorphic DNAs (RAPDs), arbitrarily primed polymerase chain reaction (AP-PCR), DNA amplification fingerprinting (DAF), sequence characterized amplified regions (SCARs), amplified fragment length polymorphisms (AFLPs), simple sequence repeats (SSRs), single nucleotide polymorphisms (SNPs), insertions or deletions (indels), sequencing, northern blots, southern blots, marker profiles, and the like.

[0089] Provided are markers, marker combinations, haplotypes, and/or marker profiles associated with tolerance of soybean plants to stem canker, as well as related primers and/or probes and methods for the use of any of the foregoing for identifying and/or selecting soybean plants with improved tolerance to stem canker. A method for determining the presence or absence of at least one allele of a particular marker or combination of markers associated with tolerance to stem canker comprises analyzing genomic DNA from a soybean plant or germplasm to determine if at least one, or a plurality, of such markers is present or absent and if present, and determining the allelic form of the marker(s). In some examples a plurality of markers on a single linkage group are investigated, and the markers present in the particular plant or germplasm can be used to determine a haplotype for that plant/germplasm. In other examples a plurality of markers on distinct linkage groups are investigated, and the markers present in the particular plant or germplasm can be used to determine a marker profile for that plant or germplasm.

[0090] Soybean seeds, plants, and plant parts comprising a polynucleotide associated with stem canker tolerance may be cleaned and/or treated. The resulting seeds, plants, or plant parts produced by the cleaning and/or treating process(es) may exhibit enhanced yield characteristics. Enhanced yield characteristics can include one or more of the following: increased germination efficiency under normal and/or stress conditions, improved plant physiology, growth and/or development, such as water use efficiency, water retention efficiency, improved nitrogen use, enhanced carbon assimilation, improved photosynthesis, and accelerated maturation, and improved disease and/or pathogen tolerance. Yield characteristics can furthermore include enhanced plant architecture (under stress and non-stress conditions), including but not limited to early flowering, flowering control for hybrid seed production, seedling vigor, plant size, internode number and distance, root growth, seed size, fruit size, pod size, pod or ear number, seed number per pod or ear, seed mass, enhanced seed filling, reduced seed dispersal, reduced pod dehiscence and lodging resistance. Further yield characteristics include seed composition, such as carbohydrate content, protein content, oil content and composition, nutritional value, reduction in anti-nutritional compounds, improved processability and better storage stability.

[0091] Cleaning a seed or seed cleaning refers to the removal of impurities and debris material from the harvested seed. Material to be removed from the seed includes but is not limited to soil, and plant waste, pebbles, weed seeds, broken soybean seeds, fungi, bacteria, insect material, including insect eggs, larvae, and parts thereof, and any other pests that exist with the harvested crop. The terms cleaning a seed or seed cleaning also refer to the removal of any debris or low quality, infested, or infected seeds and seeds of different species that are foreign to the sample.

[0092] Treating a seed or applying a treatment to a seed refers to the application of a composition to a seed as a coating or otherwise. The composition may be applied to the seed in a seed treatment at any time from harvesting of the seed to sowing of the seed. The composition may be applied using methods including but not limited to mixing in a container, mechanical application, tumbling, spraying, misting, and immersion. Thus, the composition may be applied as a powder, a crystalline, a ready-to-use, a slurry, a mist, and/or a soak. For a general discussion of techniques used to apply fungicides to seeds, see “Seed Treatment,” 2d ed., (1986), edited by K A Jeffs (chapter 9), herein incorporated by reference in its entirety. The composition to be used as a seed treatment can comprise one or more of a pesticide, a fungicide, an insecticide, a nematicide, an antimicrobial, an inoculant, a growth promoter, a polymer, a flow agent, a coating, or any combination thereof. General classes or family of seed treatment agents include triazoles, anilides, pyrazoles, carboxamides, succinate dehydrogenase inhibitors (SDHI), triazolinthiones, strobilurins, amides, and anthranilic diamides. In some examples, the seed treatment comprises trifloxystrobin, azoxystrobin, metalaxyl, metalaxyl-m, mefenoxam, fludioxinil, imidacloprid, thiamethoxam, thiabendazole, ipconazole, penflufen, sedaxane, prothioconazole, picoxystrobin, penthiopyrad, pyraclastrobin, xemium, Rhizobia spp., Bradyrhizobium spp. (e.g., B. japonicum), Bacillus spp. (e.g., B. firmus, B. pumilus, B. subtilus), lipo-chitooligosaccharide, clothianidin, cyantraniliprole, chlorantraniliprole, abamectin, and any combination thereof. In some examples the seed treatment comprises trifloxystrobin, metalaxyl, imidacloprid, Bacillus spp., and any combination thereof. In some examples the seed treatment comprises picoxystrobin, penthiopyrad, cyantraniliprole, chlorantraniliprole, and any combination thereof. In some examples, the seed treatment improves seed germination under normal and/or stress environments, early stand count, vigor, yield, root formation, nodulation, and any combination thereof. In some examples seed treatment reduces seed dust levels, insect damage, pathogen establishment and/or damage, plant virus infection and/or damage, and any combination thereof.

[0093] Genetic elements or genes located on a single chromosome segment are physically linked. In some examples, the two loci are located in close proximity such that recombination between homologous chromosome pairs does not occur between the two loci during meiosis with high frequency, e.g., such that linked loci co-segregate at least about 90% of the time, e.g., 91%, 92%, 93%, 94%, 95%, 96%, 97%, 98%, 99%, 99.5%, 99.75%, or more of the time. The genetic elements located within a chromosome segment are also genetically linked, typically within a genetic recombination distance of less than or equal to 50 centimorgans (cM), e.g., about 49, 40, 30, 20, 10, 9, 8, 7, 6, 5, 4, 3, 2, 1, 0.75, 0.5, or 0.25 cM or less. That is, two genetic elements within a single chromosome segment undergo recombination during meiosis with each other at a frequency of less than or equal to about 50%, e.g., about 49%, 40%, 30%, 20%, 10%, 9%, 8%, 7%, 6%, 5%, 4%, 3%, 2%, 1%, 0.75%, 0.5%, or 0.25% or less. Closely linked markers display a cross over frequency with a given marker of about 10% or less (the given marker is within about 10 cM of a closely linked marker). Put another way, closely linked loci co-segregate at least about 90% of the time.

[0094] In certain examples, plants or germplasm are identified that have at least one favorable allele, marker, marker profile, and/or haplotype that positively correlate with tolerance or improved tolerance. However, in other examples, it is useful to identify alleles, markers, marker profiles, and/or haplotypes that negatively correlate with tolerance, for example to eliminate such plants or germplasm from subsequent rounds of breeding.

[0095] Any marker associated with an stem canker tolerance locus or QTL is useful, including but not limited to, for example, a locus on LG B2. Further, any suitable type of marker can be used, including Restriction Fragment Length Polymorphisms (RFLPs), Single Sequence Repeats (SSRs), Target Region Amplification Polymorphisms (TRAPs), Isozyme Electrophoresis, Randomly Amplified Polymorphic DNAs (RAPDs), Arbitrarily Primed Polymerase Chain Reaction (AP-PCR), DNA Amplification Fingerprinting (DAF), Sequence Characterized Amplified Regions (SCARs), Amplified Fragment Length Polymorphisms (AFLPs), and Single Nucleotide Polymorphisms (SNPs). Additionally, other types of molecular markers known in the art or phenotypic traits may also be used in the methods.

[0096] Markers that map closer to an stem canker tolerance QTL are generally preferred over markers that map farther from such a QTL. Marker loci are especially useful when they are closely linked to an stem canker tolerance QTL. Thus, in one example, marker loci display an inter-locus cross-over frequency of about 10% or less, about 9% or less, about 8% or less, about 7% or less, about 6% or less, about 5% or less, about 4% or less, about 3% or less, about 2% or less, about 1% or less, about 0.75% or less, about 0.5% or less, or about 0.25% or less with a stem canker tolerance QTL to which they are linked. Thus, the loci are separated from the QTL to which they are linked by about 10 cM, 9 cM, 8 cM, 7 cM, 6 cM, 5 cM, 4 cM, 3 cM, 2 cM, 1 cM, 0.75 cM, 0.5 cM, or 0.25 cM or less. In certain examples, multiple marker loci that collectively make up a haplotype are investigated, for instance 2, 3, 4, 5, 6, 7, 8, 9, 10, 11, 12, 13, 14, 15, 16, 17, 18, 19, 20, 21, 22, 23, 24, 25, 26, 27, 28, 29, 30, or more marker loci.

[0097] Both chromosome number and linkage group identifiers have been used to describe soybean genome based on genetic mapping data, physical mapping data, and sequencing data and assemblies. Linkage group lengths in cM are based on the Soybean Consensus Map 3.0 produced by Perry Cregan's group at the USDA-ARS Soybean Genomics and Improvement Lab. The 11 initial linkage group to chromosome number assignments were made by Ted Hymowitz's group (Zou et al. (2003) Theor Appl Genet 107:745-750 and citations therein). The remaining 9 were given chromosome numbers in decreasing order of linkage group genetic length. Based on this system, linkage group C1 is chromosome 4 (Gm04), and linkage group C2 is chromosome 6 (Gm06). The soybean chromosome number to linkage group assignments can be found at Soybase (see, e.g., soybase.org/LG2Xsome.php).

[0098] Large numbers of soybean genetic markers have been mapped and linkage groups created, for example as described in Cregan et al., “An Integrated Genetic Linkage Map of the Soybean Genome” (1999) Crop Sci 39:1464-90, and Choi et al., “A Soybean Transcript Map: Gene Distribution, Haplotype and Single-Nucleotide Polymorphism Analysis” (2007) Genetics 176:685-96. Many soybean markers are publicly available at the USDA affiliated soybase website (www.soybase.org). All markers are used to define a specific locus on the soybean genome. Each marker is therefore an indicator of a specific segment of DNA, having a unique nucleotide sequence. The map positions provide a measure of the relative positions of particular markers with respect to one another. When a trait is stated to be linked to a given marker it will be understood that the actual DNA segment whose sequence affects the trait generally co-segregates with the marker. More precise and definite localization of a trait can be obtained if markers are identified on both sides of the trait. By measuring the appearance of the marker(s) in progeny of crosses, the existence of the trait can be detected by relatively simple molecular tests without actually evaluating the appearance of the trait itself, which can be difficult and time-consuming because the actual evaluation of the trait requires growing plants to a stage and/or under environmental conditions where the trait can be expressed. Molecular markers have been widely used to determine genetic composition in soybeans.

[0099] Favorable genotypes associated with at least trait of interest may be identified by one or more methodologies. In some examples one or more markers are used, including but not limited to AFLPs, RFLPs, ASH, SSRs, SNPs, indels, padlock probes, molecular inversion probes, microarrays, sequencing, and the like. In some methods, a target nucleic acid is amplified prior to hybridization with a probe. In other cases, the target nucleic acid is not amplified prior to hybridization, such as methods using molecular inversion probes (see, for example Hardenbol et al. (2003) Nat Biotech 21:673-678). In some examples, the genotype related to a specific trait is monitored, while in other examples, a genome-wide evaluation including but not limited to one or more of marker panels, library screens, association studies, microarrays, gene chips, expression studies, or sequencing such as whole-genome resequencing and genotyping-by-sequencing (GBS) may be used. In some examples, no target-specific probe is needed, for example by using sequencing technologies, including but not limited to next-generation sequencing methods (see, for example, Metzker (2010) Nat Rev Genet 11:31-46; and, Egan et al. (2012) Am J Bot 99:175-185) such as sequencing by synthesis (e.g., Roche 454 pyrosequencing, Illumina Genome Analyzer, and Ion Torrent PGM or Proton systems), sequencing by ligation (e.g., SOLiD from Applied Biosystems, and Polnator system from Azco Biotech), and single molecule sequencing (SMS or third-generation sequencing) which eliminate template amplification (e.g., Helicos system, and PacBio RS system from Pacific BioSciences). Further technologies include optical sequencing systems (e.g., Starlight from Life Technologies), and nanopore sequencing (e.g., GridION from Oxford Nanopore Technologies). Each of these may be coupled with one or more enrichment strategies for organellar or nuclear genomes in order to reduce the complexity of the genome under investigation via PCR, hybridization, restriction enzyme (see, e.g., Elshire et al. (2011) PLoS ONE 6:e19379), and expression methods. In some examples, no reference genome sequence is needed in order to complete the analysis.

[0100] In some examples, markers within 1 cM, 5 cM, 10 cM, 15 cM, or 30 cM of any one or more of SEQ ID NOs: 1-786 are provided. Similarly, one or more markers mapped within 1, 5, 10, 20 and 30 cM or less from the markers provided can be used for the selection or introgression of the region associated with a stem canker tolerance phenotype. In other examples, any marker that is linked with any one or more of SEQ ID NOs: 1-786 and associated with a stem canker tolerance phenotype is provided. In other examples, markers provided include a substantially a nucleic acid molecule within 5 kb, 10 kb, 20 kb, 30 kb, 100 kb, 500 kb, 1,000 kb, 10,000 kb, 25,000 kb, or 50,000 kb of a marker selected from the group consisting of SEQ ID NOs:1-786.

[0101] In addition to the markers discussed herein, information regarding useful soybean markers can be found, for example, on the USDA's Soybase website, available at www.soybase.org. One of skill in the art will recognize that the identification of favorable marker alleles may be germplasm-specific. One of skill will also recognize that methods for identifying the favorable alleles are routine and well known in the art, and furthermore, that the identification and use of such favorable alleles is well within the scope of the invention.

[0102] The use of marker assisted selection (MAS) to select a soybean plant or germplasm based upon detection of a particular marker or haplotype of interest is provided. For instance, in certain examples, a soybean plant or germplasm possessing a certain predetermined favorable marker allele, marker profile, or haplotype will be selected via MAS. Using MAS, soybean plants or germplasm can be selected for markers or marker alleles that positively correlate with tolerance, without actually raising soybean and measuring for tolerance (or, contrawise, soybean plants can be selected against if they possess markers that negatively correlate with tolerance). MAS is a powerful tool to select for desired phenotypes and for introgressing desired traits into cultivars of soybean (e.g., introgressing desired traits into elite lines). MAS is easily adapted to high throughput molecular analysis methods that can quickly screen large numbers of plant or germplasm genetic material for the markers of interest and is much more cost effective than raising and observing plants for visible traits.

[0103] In some examples, molecular markers are detected using a suitable amplification-based detection method. Typical amplification methods include various polymerase based replication methods, including the polymerase chain reaction (PCR), ligase mediated methods, such as the ligase chain reaction (LCR), and RNA polymerase based amplification (e.g., by transcription) methods. In these types of methods, nucleic acid primers are typically hybridized to the conserved regions flanking the polymorphic marker region. In certain methods, nucleic acid probes that bind to the amplified region are also employed. In general, synthetic methods for making oligonucleotides, including primers and probes, are well known in the art. For example, oligonucleotides can be synthesized chemically according to the solid phase phosphoramidite triester method described by Beaucage & Caruthers (1981) Tetrahedron Letts 22:1859-1862, e.g., using a commercially available automated synthesizer, e.g., as described in Needham-VanDevanter, et al. (1984) Nucl Acids Res 12:6159-6168. Oligonucleotides, including modified oligonucleotides, can also be ordered from a variety of commercial sources known to persons of skill in the art.

[0104] It will be appreciated that suitable primers and probes to be used can be designed using any suitable method. It is not intended that the invention be limited to any particular primer, primer pair, or probe. For example, primers can be designed using any suitable software program, such as LASERGENE® or Primer3.

[0105] It is not intended that the primers be limited to generating an amplicon of any particular size. For example, the primers used to amplify the marker loci and alleles herein are not limited to amplifying the entire region of the relevant locus. In some examples, marker amplification produces an amplicon at least 20 nucleotides in length, at least 50 nucleotides in length, at least 100 nucleotides in length, at least 200 nucleotides in length, at least 300 nucleotides in length, at least 400 nucleotides in length, at least 500 nucleotides in length, at least 1000 nucleotides in length, at least 2000 nucleotides in length, or greater than 2000 nucleotides in length. PCR, RT-PCR, and LCR are common amplification and amplification-detection methods for amplifying nucleic acids of interest (e.g., those comprising marker loci), facilitating detection of the markers. Details regarding the use of these and other amplification methods are well known in the art and can be found in any of a variety of standard texts. Details for these techniques can also be found in numerous journal and patent references, such as Mullis, et al. (1987) U.S. Pat. No. 4,683,202; Arnheim & Levinson (1990) C&EN 68:36-47; Kwoh et al. (1989) Proc Natl Acad Sci USA 86:1173; Guatelli et al. (1990) Proc Natl Acad Sci USA 87:1874; Lomell et al. (1989) J Clin Chem 35:1826; Landegren et al. (1988) Science 241:1077-1080; Van Brunt (1990) Biotechnology 8:291-294; Wu & Wallace (1989) Gene 4:560; Barringer et al. (1990) Gene 89:117; and Sooknanan & Malek (1995) Biotechnology 13:563-564.

[0106] Such nucleic acid amplification techniques can be applied to amplify and/or detect nucleic acids of interest, such as nucleic acids comprising marker loci. Amplification primers for amplifying useful marker loci and suitable probes to detect useful marker loci or to genotype alleles, such as SNP alleles, are provided. However, one of skill will immediately recognize that other primer and probe sequences could also be used. For instance primers to either side of the given primers can be used in place of the given primers, so long as the primers can amplify a region that includes the allele to be detected, as can primers and probes directed to other marker loci. Further, it will be appreciated that the precise probe to be used for detection can vary, e.g., any probe that can identify the region of a marker amplicon to be detected can be substituted for those examples provided herein, and the configuration of the amplification primers and detection probes can, of course, vary. Thus, the compositions and methods are not limited to the primers and probes specifically recited herein.

[0107] In certain examples, probes will possess a detectable label. Any suitable label can be used with a probe. Detectable labels suitable for use with nucleic acid probes include, for example, any composition detectable by spectroscopic, radioisotopic, photochemical, biochemical, immunochemical, electrical, optical, or chemical means. Useful labels include biotin for staining with labeled streptavidin conjugate, magnetic beads, fluorescent dyes, radiolabels, enzymes, and colorimetric labels. Other labels include ligands, which bind to antibodies labeled with fluorophores, chemiluminescent agents, and enzymes. A probe can also constitute radiolabelled PCR primers that are used to generate a radiolabelled amplicon. Labeling strategies for nucleic acids and corresponding detection strategies can be found, e.g., in Haugland (1996) Handbook of Fluorescent Probes and Research Chemicals (6th Ed.), Molecular Probes, Inc. (Eugene, Oreg.); or in Haugland (2001) Handbook of Fluorescent Probes and Research Chemicals (8th Ed.), Molecular Probes, Inc. (Eugene, Oreg.).

[0108] Detectable labels may also include reporter-quencher pairs, such as are employed in Molecular Beacon and TaqMan™ probes. The reporter may be a fluorescent organic dye modified with a suitable linking group for attachment to the oligonucleotide, such as to the terminal 3′ carbon or terminal 5′ carbon. The quencher may also be an organic dye, which may or may not be fluorescent. Generally, whether the quencher is fluorescent or simply releases the transferred energy from the reporter by non-radiative decay, the absorption band of the quencher should at least substantially overlap the fluorescent emission band of the reporter to optimize the quenching. Non-fluorescent quenchers or dark quenchers typically function by absorbing energy from excited reporters, but do not release the energy radiatively.

[0109] Selection of appropriate reporter-quencher pairs for particular probes may be undertaken in accordance with known techniques. Fluorescent and dark quenchers and their relevant optical properties from which exemplary reporter-quencher pairs may be selected are listed and described, for example, in Berlman, Handbook of Fluorescence Spectra of Aromatic Molecules (2nd Ed.), Academic Press, New York, 1971, the content of which is incorporated herein by reference. Examples of modifying reporters and quenchers for covalent attachment via common reactive groups that can be added to an oligonucleotide in the present invention may be found, for example, in Haugland (2001) Handbook of Fluorescent Probes and Research Chemicals (8th Ed.), Molecular Probes, Inc. (Eugene, Oreg.), the content of which is incorporated herein by reference.

[0110] In certain examples, reporter-quencher pairs are selected from xanthene dyes including fluorescein and rhodamine dyes. Many suitable forms of these compounds are available commercially with substituents on the phenyl groups, which can be used as the site for bonding or as the bonding functionality for attachment to an oligonucleotide. Another useful group of fluorescent compounds for use as reporters are the naphthylamines, having an amino group in the alpha or beta position. Included among such naphthylamino compounds are 1-dimethylaminonaphthyl-5 sulfonate, 1-anilino-8-naphthalene sulfonate and 2-p-touidinyl-6-naphthalene sulfonate. Other dyes include 3-phenyl-7-isocyanatocoumarin; acridines such as 9-isothiocyanatoacridine; N-(p-(2-benzoxazolyl)phenyl)maleimide; benzoxadiazoles; stilbenes; pyrenes and the like. In certain other examples, the reporters and quenchers are selected from fluorescein and rhodamine dyes. These dyes and appropriate linking methodologies for attachment to oligonucleotides are well known in the art.

[0111] Suitable examples of reporters may be selected from dyes such as SYBR green, 5-carboxyfluorescein (5-FAM™ available from Applied Biosystems (Foster City, Calif., USA), 6-carboxyfluorescein (6-FAM™), tetrachloro-6-carboxyfluorescein (TET), 2,7-dimethoxy-4,5-dichloro-6-carboxyfluorescein, hexachloro-6-carboxyfluorescein (HEX), 6-carboxy-2′,4,7,7′-tetrachlorofluorescein (6-TET™ available from Applied Biosystems), carboxy-X-rhodamine (ROX), 6-carboxy-4′,5′-dichloro-2′,7′-dimethoxyfluorescein (6-JOE™ available from Applied Biosystems), VIC™ dye products available from Molecular Probes, Inc., NED™ dye products available from available from Applied Biosystems, and the like. Suitable examples of quenchers may be selected from 6-carboxy-tetramethyl-rhodamine, 4-(4-dimethylaminophenylazo) benzoic acid (DABYL), tetramethylrhodamine (TAMRA), BHQ-0™, BHQ-1™, BHQ-2™, and BHQ-3™, each of which are available from Biosearch Technologies, Inc. (Novato, Calif., USA), QSY-7™, QSY-9™, QSY-21™ and Q5Y-35™, each of which are available from Molecular Probes, Inc., and the like.

[0112] In one aspect, real time PCR or LCR is performed on the amplification mixtures described herein, e.g., using molecular beacons or TAQMAN™ probes. A molecular beacon (MB) is an oligonucleotide which, under appropriate hybridization conditions, self-hybridizes to form a stem and loop structure. The MB has a label and a quencher at the termini of the oligonucleotide; thus, under conditions that permit intra-molecular hybridization, the label is typically quenched (or at least altered in its fluorescence) by the quencher. Under conditions where the MB does not display intra-molecular hybridization (e.g., when bound to a target nucleic acid, such as to a region of an amplicon during amplification), the MB label is unquenched. Details regarding standard methods of making and using MBs are well established in the literature and MBs are available from a number of commercial reagent sources. See also, e.g., Leone, et al., (1995) Nucl Acids Res 26:2150-2155; Tyagi & Kramer (1996) Nature Biotechnol 14:303-308; Blok & Kramer (1997) Mol Cell Probes 11:187-194; Hsuih et al. (1997) J Clin Microbiol 34:501-507; Kostrikis et al. (1998) Science 279:1228-1229; Sokol et al. (1998) Proc Natl Acad Sci USA 95:11538-11543; Tyagi et al. (1998) Nature Biotechnol 16:49-53; Bonnet et al. (1999) Proc Natl Acad Sci USA 96:6171-6176; Fang et al. (1999) J Am Chem Soc 121:2921-2922; Marras et al. (1999) Genet Anal Biomol Eng 14:151-156; and, Vet et al. (1999) Proc Natl Acad Sci USA 96:6394-6399. Additional details regarding MB construction and use are also found in the patent literature, e.g., U.S. Pat. Nos. 5,925,517; 6,150,097; and 6,037,130.

[0113] Another real-time detection method is the 5′-exonuclease detection method, also called the TAQMAN™ assay, for example as set forth in U.S. Pat. Nos. 5,804,375; 5,538,848; 5,487,972; and 5,210,015, each of which is hereby incorporated by reference in its entirety. In the TAQMAN™ assay, a modified probe, typically 10-30 nucleotides in length, is employed during PCR which binds intermediate to or between the two members of the amplification primer pair. The modified probe possesses a reporter and a quencher and is designed to generate a detectable signal to indicate that it has hybridized with the target nucleic acid sequence during PCR. As long as both the reporter and the quencher are on the probe, the quencher stops the reporter from emitting a detectable signal. However, as the polymerase extends the primer during amplification, the intrinsic 5′ to 3′ nuclease activity of the polymerase degrades the probe, separating the reporter from the quencher, and enabling the detectable signal to be emitted. Generally, the amount of detectable signal generated during the amplification cycle is proportional to the amount of product generated in each cycle.

[0114] It is well known that the efficiency of quenching is a strong function of the proximity of the reporter and the quencher, i.e., as the two molecules get closer, the quenching efficiency increases. As quenching is strongly dependent on the physical proximity of the reporter and quencher, the reporter and the quencher are typically attached to the probe within a few nucleotides of one another, usually within 30 nucleotides of one another, or within 6 to 16 nucleotides. Typically, this separation is achieved by attaching one member of a reporter-quencher pair to the 5′ end of the probe and the other member to a nucleotide about 6 to 16 nucleotides away, in some cases at the 3′ end of the probe.

[0115] Separate detection probes can also be omitted in amplification/detection methods, e.g., by performing a real time amplification reaction that detects product formation by modification of the relevant amplification primer upon incorporation into a product, incorporation of labeled nucleotides into an amplicon, or by monitoring changes in molecular rotation properties of amplicons as compared to unamplified precursors (e.g., by fluorescence polarization).

[0116] One example of a suitable real-time detection technique that does not use a separate probe that binds intermediate to the two primers is the KASPar detection system/method, which is well-known in the art. In KASPar, two allele specific primers are designed such that the 3′ nucleotide of each primer hybridizes to the polymorphic base. For example, if the SNP is an A/C polymorphism, one of the primers would have an “A” in the 3′ position, while the other primer would have a “C” in the 3′ position. Each of these two allele specific primers also has a unique tail sequence on the 5′ end of the primer. A common reverse primer is employed that amplifies in conjunction with either of the two allele specific primers. Two 5′ fluor-labeled reporter oligos are also included in the reaction mix, one designed to interact with each of the unique tail sequences of the allele-specific primers. Lastly, one quencher oligo is included for each of the two reporter oligos, the quencher oligo being complementary to the reporter oligo and being able to quench the fluor signal when bound to the reporter oligo. During PCR, the allele-specific primers and reverse primers bind to complementary DNA, allowing amplification of the amplicon to take place. During a subsequent cycle, a complementary nucleic acid strand containing a sequence complementary to the unique tail sequence of the allele-specific primer is created. In a further cycle, the reporter oligo interacts with this complementary tail sequence, acting as a labeled primer. Thus, the product created from this cycle of PCR is a fluorescently-labeled nucleic acid strand. Because the label incorporated into this amplification product is specific to the allele specific primer that resulted in the amplification, detecting the specific fluor presenting a signal can be used to determine the SNP allele that was present in the sample.

[0117] Further, it will be appreciated that amplification is not a requirement for marker detection, for example, one can directly detect unamplified genomic DNA simply by performing a Southern blot on a sample of genomic DNA. Procedures for performing Southern blotting, amplification e.g., (PCR, LCR, or the like), and many other nucleic acid detection methods are well established and are taught, e.g., in Sambrook et al. Molecular Cloning—A Laboratory Manual (3d ed.) Vol. 1-3, Cold Spring Harbor Laboratory, Cold Spring Harbor, N.Y., 2000 (“Sambrook”); Current Protocols in Molecular Biology, F. M. Ausubel et al., eds., Current Protocols, a joint venture between Greene Publishing Associates, Inc. and John Wiley & Sons, Inc., (supplemented through 2002) (“Ausubel”); and, PCR Protocols A Guide to Methods and Applications (Innis et al., eds) Academic Press Inc. San Diego, Calif. (1990) (“Innis”), additional details regarding detection of nucleic acids in plants can also be found, e.g., in Plant Molecular Biology (1993) Croy (ed.) BIOS Scientific Publishers, Inc., each of these are herein incorporated by reference in their entirety.

[0118] Other techniques for detecting SNPs can also be employed, such as allele specific hybridization (ASH) or nucleic acid sequencing techniques. ASH technology is based on the stable annealing of a short, single-stranded, oligonucleotide probe to a completely complementary single-stranded target nucleic acid. Detection is via an isotopic or non-isotopic label attached to the probe. For each polymorphism, two or more different ASH probes are designed to have identical DNA sequences except at the polymorphic nucleotides. Each probe will have exact homology with one allele sequence so that the range of probes can distinguish all the known alternative allele sequences. Each probe is hybridized to the target DNA. With appropriate probe design and hybridization conditions, a single-base mismatch between the probe and target DNA will prevent hybridization.

[0119] Isolated polynucleotide or fragments thereof are capable of specifically hybridizing to other nucleic acid molecules under appropriate conditions. In one example, the nucleic acid molecules comprise any one or more of SEQ ID NOs: 1-786, complements thereof and fragments thereof. In another aspect, the nucleic acid molecules of the present invention include nucleic acid molecules that hybridize, for example, under high or low stringency, substantially homologous sequences, or that have both to these molecules. Conventional stringency conditions are described by Sambrook et al. In: Molecular Cloning, A Laboratory Manual, 2nd Edition, Cold Spring Harbor Press, Cold Spring Harbor, N.Y. (1989)), and by Haymes et al. In: Nucleic Acid Hybridization, A Practical Approach, IRL Press, Washington, D.C. (1985). Departures from complete complementarity are therefore permissible, as long as such departures do not completely preclude the capacity of the molecules to form a double-stranded structure. In order for a nucleic acid molecule to serve as a primer or probe it need only be sufficiently complementary in sequence to be able to form a stable double-stranded structure under the particular solvent and salt concentrations employed. Appropriate stringency conditions that promote DNA hybridization are, for example, 6.0× sodium chloride/sodium citrate (SSC) at about 45° C., followed by a wash of 2.0×SSC at 50° C., are known to those skilled in the art or can be found in Current Protocols in Molecular Biology, John Wiley & Sons, N.Y., 1989, 6.3.1-6.3.6. For example, the salt concentration in the wash step can be selected from a low stringency of about 2.0×SSC at 50° C. to a high stringency of about 0.2×SSC at 50° C. In addition, the temperature in the wash step can be increased from low stringency conditions at room temperature, about 22° C., to high stringency conditions at about 65° C. Both temperature and salt may be varied, or either the temperature or the salt concentration may be held constant while the other variable is changed.

[0120] In some examples, an a marker locus will specifically hybridize to one or more of the nucleic acid molecules set forth in SEQ ID NOs:1-786 or complements thereof or fragments of either under moderately stringent conditions, for example at about 2.0×SSC and about 65° C. In an aspect, a nucleic acid of the present invention will specifically hybridize to one or more SEQ ID NOs: 1-786 or complements or fragments of either under high stringency conditions.

[0121] In some examples, a marker associated with a stem canker tolerance phenotype comprises any one of SEQ ID NOs: 1-786 or complements or fragments thereof. In other examples, a marker has between 80%, 85%, 90%, 91%, 92%, 93%, 94%, 95%, 96%, 97%, 98%, 99%, or 100% sequence identity to any one of SEQ ID NOs: 1-786 or complements or fragments thereof. Unless otherwise stated, percent sequence identity is determined using the GAP program is default parameters for nucleic acid alignment (Accelrys, San Diego, Calif., USA).

[0122] Real-time amplification assays, including MB or TAQMAN™ based assays, are especially useful for detecting SNP alleles. In such cases, probes are typically designed to bind to the amplicon region that includes the SNP locus, with one allele-specific probe being designed for each possible SNP allele. For instance, if there are two known SNP alleles for a particular SNP locus, “A” or “C,” then one probe is designed with an “A” at the SNP position, while a separate probe is designed with a “C” at the SNP position. While the probes are typically identical to one another other than at the SNP position, they need not be. For instance, the two allele-specific probes could be shifted upstream or downstream relative to one another by one or more bases. However, if the probes are not otherwise identical, they should be designed such that they bind with approximately equal efficiencies, which can be accomplished by designing under a strict set of parameters that restrict the chemical properties of the probes. Further, a different detectable label, for instance a different reporter-quencher pair, is typically employed on each different allele-specific probe to permit differential detection of each probe. In certain examples, each allele-specific probe for a certain SNP locus is 13-18 nucleotides in length, dual-labeled with a florescence quencher at the 3′ end and either the 6-FAM™ (6-carboxyfluorescein) or VIC™ (4,7,2′-trichloro-7′-phenyl-6-carboxyfluorescein) fluorophore at the 5′ end. By detecting signal for each label employed and determining which detectable label(s) demonstrated an increased signal, a determination can be made of which allele-specific probe(s) bound to the amplicon and, thus, which SNP allele(s) the amplicon possessed. For instance, when 6-FAM™- and VIC™-labeled probes are employed, the distinct emission wavelengths of 6-FAM™ (518 nm) and VIC™ (554 nm) can be captured. A sample that is homozygous for one allele will have fluorescence from only the respective 6-FAM™ or VIC™ fluorophore, while a sample that is heterozygous at the analyzed locus will have both 6-FAM™ and VIC™ fluorescence.

[0123] Introgression of stem canker tolerance into less tolerant soybean germplasm is provided. Any method for introgressing a QTL or marker into soybean plants known to one of skill in the art can be used. Typically, a first soybean germplasm having tolerance to stem canker based on a particular locus, marker, polymorphism, haplotype, and/or marker profile and a second soybean germplasm that lacks such tolerance are provided. The first soybean germplasm may be crossed with the second soybean germplasm to provide progeny soybean germplasm. These progeny germplasm are screened to determine the presence of stem canker tolerance derived from the locus, marker, polymorphism, haplotype, and/or marker profile, and progeny that tests positive for the presence of tolerance derived from the locus, marker, polymorphism, haplotype, and/or marker profile are selected as being soybean germplasm into which the marker or haplotype has been introgressed. Methods for performing such screening are well known in the art and any suitable method can be used, including but not limited to the methods taught in Keeling (1982) Phytopathology 72:807-809, herein incorporated by reference in its entirety.

[0124] One application of MAS is to use the tolerance markers or haplotypes to increase the efficiency of an introgression or backcrossing effort aimed at introducing a tolerance trait into a desired (typically high yielding) background. In marker assisted backcrossing of specific markers from a donor source, e.g., to an elite genetic background, one selects among backcross progeny for the donor trait and then uses repeated backcrossing to the elite line to reconstitute as much of the elite background's genome as possible.

[0125] Thus, the markers and methods can be utilized to guide marker assisted selection or breeding of soybean varieties with the desired complement (set) of allelic forms of chromosome segments associated with superior agronomic performance (tolerance, along with any other available markers for yield, disease tolerance, etc.). Any of the disclosed marker alleles or haplotypes can be introduced into a soybean line via introgression, by traditional breeding (or introduced via transformation, or both) to yield a soybean plant with superior agronomic performance. The number of alleles associated with tolerance that can be introduced or be present in a soybean plant ranges from 1 to the number of alleles disclosed herein, each integer of which is incorporated herein as if explicitly recited.

[0126] This also provides a method of making a progeny soybean plant and these progeny soybean plants, per se. The method comprises crossing a first parent soybean plant with a second soybean plant and growing the female soybean plant under plant growth conditions to yield soybean plant progeny. Methods of crossing and growing soybean plants are well within the ability of those of ordinary skill in the art. Such soybean plant progeny can be assayed for at least one locus, marker, polymorphism, haplotype, and/or marker profile associated with tolerance and, thereby, the desired progeny selected. Such progeny plants or seed can be sold commercially for soybean production, used for food, processed to obtain a desired constituent of the soybean, or further utilized in subsequent rounds of breeding. At least one of the first or second soybean plants is a soybean plant that comprises at least one of the locus, marker, polymorphism, haplotype, and/or marker profile associated with tolerance, such that the progeny are capable of inheriting the locus, marker, polymorphism, haplotype, and/or marker profile.

[0127] Often, a method is applied to at least one related soybean plant such as from progenitor or descendant lines in the subject soybean plants pedigree such that inheritance of the desired tolerance can be traced. The number of generations separating the soybean plants being subject to the methods will generally be from 1 to 20, commonly 1 to 5, and typically 1, 2, or 3 generations of separation, and quite often a direct descendant or parent of the soybean plant will be subject to the method (i.e., 1 generation of separation).

[0128] Genetic diversity is important for long term genetic gain in any breeding program. With limited diversity, genetic gain will eventually plateau when all of the favorable alleles have been fixed within the elite population. One objective is to incorporate diversity into an elite pool without losing the genetic gain that has already been made and with the minimum possible investment. MAS provides an indication of which genomic regions and which favorable alleles from the original ancestors have been selected for and conserved over time, facilitating efforts to incorporate favorable variation from exotic germplasm sources (parents that are unrelated to the elite gene pool) in the hopes of finding favorable alleles that do not currently exist in the elite gene pool. For example, the markers, haplotypes, primers, and probes can be used for MAS involving crosses of non-elite lines to elite lines or to exotic lines, elite lines to exotic soybean lines (elite X exotic), or any other crossing strategy, by subjecting the segregating progeny to MAS to maintain major yield alleles, along with the tolerance marker alleles herein.

[0129] As an alternative to standard breeding methods of introducing traits of interest into soybean (e.g., introgression), transgenic approaches can also be used to create transgenic plants with the desired traits. In these methods, exogenous nucleic acids that encode a desired QTL, marker, or haplotype are introduced into target plants or germplasm. For example, a nucleic acid that codes for a stem canker tolerance trait is cloned, e.g., via positional cloning, and introduced into a target plant or germplasm.

[0130] Experienced plant breeders can recognize stem canker tolerant soybean plants in the field, and can select the tolerant individuals or populations for breeding purposes or for propagation. In this context, the plant breeder recognizes tolerant and non-tolerant or susceptible soybean plants. However, plant tolerance is a phenotypic spectrum consisting of extremes in tolerance and susceptibility, as well as a continuum of intermediate tolerance phenotypes. Evaluation of these intermediate phenotypes using reproducible assays are of value to scientists who seek to identify genetic loci that impart tolerance, to conduct marker assisted selection for tolerant populations, and to use introgression techniques to breed a tolerance trait into an elite soybean line, for example.

[0131] Phenotypic screening and selection of tolerant and/or susceptible soybean plants may be performed, for example, by exposing plants to a stem canker pathogen, including but not limited to examples such as inoculation, natural exposure, spray tests, dosage tests, leaf painting assays, tissue culture assays, and/or germination assays, and selecting those plants showing tolerance. Any such assay known to the art may be used, e.g., as described in Keeling (1982) Phytopathology 72:807-809 which is incorporated herein by reference in its entirety, or as described herein.

[0132] In some examples, a kit or an automated system for detecting one or more locus, marker, polymorphism, haplotype, and/or marker profile, and/or for correlating the locus, marker, polymorphism, haplotype, and/or marker profile with a desired phenotype (e.g., stem canker tolerance), are provided. Thus, a typical kit can include a set of marker probes and/or primers configured to detect at least one favorable allele of one or more marker locus associated with tolerance, improved tolerance, or susceptibility to stem canker. These probes or primers can be configured, for example, to detect the marker alleles noted in the tables and examples herein, e.g., using any available allele detection format, such as solid or liquid phase array based detection, microfluidic-based sample detection, one or more heterologous detectable labels, etc. The kits can further include packaging materials for packaging the probes, or primers, instructions, controls, such as control amplification reactions that include probes, primers, and/or template nucleic acids for amplifications, molecular size markers, buffers, other reagents, containers for mixing and/or reactions, or the like.

[0133] A typical system can also include a detector that is configured to detect one or more signal outputs from the set of marker probes or primers, or amplicon thereof, thereby identifying the presence or absence of the allele. A wide variety of signal detection apparatus are available, including photo multiplier tubes, spectrophotometers, CCD arrays, scanning detectors, phototubes and photodiodes, microscope stations, galvo-scans, microfluidic nucleic acid amplification detection appliances, and the like. The precise configuration of the detector will depend, in part, on the type of label used to detect the marker allele, as well as the instrumentation that is most conveniently obtained for the user. Detectors that detect fluorescence, phosphorescence, radioactivity, pH, charge, absorbance, luminescence, temperature, magnetism or the like can be used. Typical detector examples include light (e.g., fluorescence) detectors or radioactivity detectors. For example, detection of a light emission (e.g., a fluorescence emission) or other probe label is indicative of the presence or absence of a marker allele. Fluorescent detection is generally used for detection of amplified nucleic acids (however, upstream and/or downstream operations can also be performed on amplicons, which can involve other detection methods). In general, the detector detects one or more label (e.g., light) emission from a probe label, which is indicative of the presence or absence of a marker allele. The detector(s) optionally monitors one or a plurality of signals from an amplification reaction. For example, the detector can monitor optical signals which correspond to real time amplification assay results.

[0134] System or kit instructions that describe how to use the system or kit and/or that correlate the presence or absence of the allele with the predicted tolerance or susceptibility phenotype are also provided. For example, the instructions can include at least one look-up table that includes a correlation between the presence or absence of one or more of the favorable allele(s) or polymorphisms and the predicted tolerance or improved tolerance. The precise form of the instructions can vary depending on the components of the system, e.g., they can be present as system software in one or more integrated unit of the system (e.g., a microprocessor, computer or computer readable medium), or can be present in one or more units (e.g., computers or computer readable media) operably coupled to the detector.

[0135] Isolated nucleic acids comprising a nucleic acid sequence coding for tolerance or susceptibility to stem canker, or capable of detecting such a phenotypic trait, or sequences complementary thereto, are also included. In certain examples, the isolated nucleic acids are capable of hybridizing under stringent conditions to nucleic acids of a soybean cultivar displaying tolerance to stem canker, for instance to particular markers, including but not limited to one or more of a marker locus associated with stem canker tolerance, a marker locus closely linked to any of the marker loci, SEQ ID NOs: 1-786, loci identified and provided in FIG. 1 and/or any one of Tables 1-13, and any combination of thereof. In some examples the isolated nucleic acid has been chemically synthesized in vitro. In some examples the isolated nucleic acid comprises a detectable label or tag. In some examples the detectable label or tag comprises at least one compound selected from the group consisting of a fluorophore, a ligand, an enzyme, a dye, a radioisotope, and a metal.

[0136] Vectors comprising such nucleic acids, expression products of such vectors expressed in a host compatible therewith, antibodies to the expression product (both polyclonal and monoclonal), and antisense nucleic acids are also included. In some examples, one or more of these nucleic acids is provided in a kit.

[0137] Soybean plants and germplasm disclosed herein or derived therefrom or identified using the methods provided and having marker loci associated with stem canker tolerance may be used as a parental line. Also included are soybean plants produced by any of the foregoing methods. Seed of a soybean germplasm produced by crossing a soybean variety having a locus, a marker, a polymorphism, an allele, a haplotype, and/or a marker profile associated with stem canker tolerance with a soybean variety lacking such locus, marker, polymorphism, allele, haplotype, and/or marker profile and progeny thereof, is also included.

[0138] The present invention is illustrated by the following examples. The foregoing and following description of the present invention and the various examples are not intended to be limiting of the invention but rather are illustrative thereof. Hence, it will be understood that the invention is not limited to the specific details of these examples.

### EXAMPLES

### Example 1

### Stem Canker Screen

[0139] Any screening protocol known in the art can be used to evaluate the tolerance of a plant or plant variety to stem canker, including but not limited to field screens, greenhouse screens, bioassays, and the like.

[0140] A. Controlled Environment

[0141] Soybean varieties were planted in a controlled environment and screened for tolerance to stem canker pathogen using a toothpick inoculation method essentially as described by Keeling (1982) Phytopathology 72:807-809. Plants are inoculated with Diaporthe phaseolorum var. meridionalis at the V3 growth stage. Watering is discontinued 10 days before the target evaluation date. Plants are evaluated for stem canker lesions approximately 30 days after inoculation. Optionally one or more susceptible and/or resistant check variety can be included in each experiment.

[0142] In some experiments, plants are pulled, leaves removed, each stem split longitudinally to measure any internal lesions. Infection types are recorded and grouped into four classes:

[0143] Alive, plants have no symptoms or lesions (resistant)

[0144] Lightly infected, plants with small stem lesions

[0145] Heavily infected, plants with large stem lesions

[0146] Dead, whole plant died (susceptible)

These classes represent scores of 1 (susceptible), 3, 6, or 9 (resistant) on a 1-9 scoring scale.

[0147] Alternatively, or additionally, a survival rate can be calculated and translated to a 1-9 scoring scale where 1 (susceptible) shows 19% or less surviving plants and 9 (resistant) shows 90% or greater surviving plants.

[0148] B. Field Screen

[0149] Soybean varieties were screened for tolerance to stem canker pathogen using a toothpick inoculation method essentially as described by Keeling (1982) Phytopathology 72:807-809. Plants are inoculated with Diaporthe phaseolorum var. meridionalis at the V3 to V4 growth stage. Plants are evaluated for both external and internal stem canker lesions approximately 60 days after inoculation. Optionally one or more susceptible and/or resistant check variety can be included in each experiment.

[0150] Individual plants are scored for External lesions and classified using a 1 to 9 scale as follows:

[0151] 1=Foliar symptoms or plant death (susceptible)

[0152] 3=Lesion greater than 2 inches, no foliar symptoms

[0153] 5=Lesion between 0.5 to 2 inches, no foliar symptoms

[0154] 7=Lesion less than 0.5 inches, no foliar symptoms

[0155] 9=No lesion (resistant)

[0156] Individual plants are scored for Internal lesions after splitting the stem longitudinally. Plants are classified as resistant (RES) or susceptible (SUS) base on the presence or absence of lesions.

[0157] The External and Internal scores are combined and translated to a 1 to 9 scale to provide an Overall stem canker score, where 1 is susceptible and 9 is resistant.

### Example 2

### Case Control Association Study

[0158] Using a case-control association analysis, a previously identified QTL on LG B2

[0159] (Gm14), which conditions variation in stem canker resistance, was fine-mapped between 1697331-2019929 bp on the Williams82 soybean reference genome. A set of 647 SNPs, including the current Pioneer Production SNPs S08231-1 and S08255-3, that perfectly differentiate resistant from susceptible lines were identified in this region. These SNPs are ideal candidates for marker-assisted selection of resistance to stem canker. Phenotype scores covered the low and the high ends of the range from the most susceptible (score=1) to the most tolerance (score=9), wherein the susceptible group had scores ranging from 1-3.82 (11 lines), and the resistant group scored from 7.71-9.0 (17 lines).

[0160] DNA was prepped using standard Illumina TruSeq Chemistry and lines were sequenced to ˜0.5-40× genome coverage on an Illumina HiSeq2000. SNPs were called using proprietary software. The publicly available software Haploview (Barrett et al. (2005) Bioinformatics 21:263-265) was used to conduct a case-control association analysis on a set of 7426 SNPs identified in the region from 97,600-2,500,000 bp on Gm14. The case group comprised 17 proprietary soybean lines resistant to stem canker, and the control group comprised 11 proprietary susceptible lines (Table 1). Following Haploview filtering using the settings noted below, 6473 SNPs remained in the analysis. Physical positions are based on the Glymal Williams82 soybean reference assembly from JGI.

### Haploview Settings:

[0161] Do Association Test
[0162] Case/Control Data
[0163] Ignore Pairwise comparisons of markers >100 kb apart
[0164] Exclude individuals with >50% missing genotypes
[0165] HW p-value cutoff: 0.0
[0166] Min genotype % 50
[0167] Max # mendel errors: 1
[0168] Minimum minor allele freq. 0.04

[0169] The chi square values from the case-control association analysis against the physical positions of 61911 SNPs reveals a peak of SNP to trait association between 1697331-2019929 bp on Gm14 (LG B2), suggesting a locus conditioning stem canker tolerance is in this region (Glymal Williams82 soybean reference assembly from JGI, described in Schmutz et al. (2010) Nature 463:178-183). 647 SNPs have a perfect association between 11 susceptible (control) and 17 resistant (case) lines, and comprise ideal targets for marker assay design and marker assisted selection. Numerous additional SNPs identified here that are linked to the region but are not highly associated with the trait could be very informative markers when used in select germplasm.

[0170] Table 2 summarizes the case control results and associated information for SNPs having perfect association between 11 susceptible (control) and 17 tolerant (case) lines. The naming convention indicates chromosome and physical position (e.g., Gm14:1706695). Pioneer markers for MAS of stem canker, S08231-3 and S08255-3 (Gm14:1727084 and Gm14:1755250 bp respectively), are formatted in bold.

TABLE 2

| | | Case, | | | |
|---|---|---|---|---|---|
| | | Control | | | |
| | Allele | Ratio | Control | Chi | |
| SNP | (R/S) | counts | Frequencies | Square | P-value |
| Gm14:1706695 | A/T | 32:0, 0:20 | 1.000, 0.000 | 52 | 5.55E−13 |
| Gm14:1723656 | C/T | 32:0, 0:20 | 1.000, 0.000 | 52 | 5.55E−13 |
| Gm14:1723831 | G/A | 32:0, 0:20 | 1.000, 0.000 | 52 | 5.55E−13 |
| Gm14:1724319 | G/A | 32:0, 0:20 | 1.000, 0.000 | 52 | 5.55E−13 |
| Gm14:1738483 | G/A | 32:0, 0:20 | 1.000, 0.000 | 52 | 5.55E−13 |
| Gm14:1739929 | A/G | 32:0, 0:20 | 1.000, 0.000 | 52 | 5.55E−13 |
| Gm14:1850843 | A/G | 32:0, 0:20 | 1.000, 0.000 | 52 | 5.55E−13 |
| Gm14:1853044 | T/G | 32:0, 0:20 | 1.000, 0.000 | 52 | 5.55E−13 |
| Gm14:1863371 | G/A | 32:0, 0:20 | 1.000, 0.000 | 52 | 5.55E−13 |
| Gm14:1863436 | G/A | 32:0, 0:20 | 1.000, 0.000 | 52 | 5.55E−13 |
| Gm14:1863868 | C/T | 32:0, 0:20 | 1.000, 0.000 | 52 | 5.55E−13 |
| Gm14:1914305 | C/T | 32:0, 0:20 | 1.000, 0.000 | 52 | 5.55E−13 |
| Gm14:1936105 | T/C | 32:0, 0:20 | 1.000, 0.000 | 52 | 5.55E−13 |
| Gm14:1939210 | A/G | 32:0, 0:20 | 1.000, 0.000 | 52 | 5.55E−13 |
| Gm14:1940046 | C/T | 32:0, 0:20 | 1.000, 0.000 | 52 | 5.55E−13 |
| Gm14:1942461 | C/T | 32:0, 0:20 | 1.000, 0.000 | 52 | 5.55E−13 |
| Gm14:1942681 | T/C | 32:0, 0:20 | 1.000, 0.000 | 52 | 5.55E−13 |
| Gm14:1700735 | T/C | 32:0, 0:20 | 1.000, 0.000 | 50 | 1.54E−12 |
| Gm14:1702258 | G/A | 32:0, 0:20 | 1.000, 0.000 | 50 | 1.54E−12 |
| Gm14:1715352 | C/T | 32:0, 0:20 | 1.000, 0.000 | 50 | 1.54E−12 |
| Gm14:1718565 | A/C | 32:0, 0:20 | 1.000, 0.000 | 50 | 1.54E−12 |
| Gm14:1722078 | C/T | 32:0, 0:20 | 1.000, 0.000 | 50 | 1.54E−12 |
| Gm14:1722192 | T/C | 32:0, 0:20 | 1.000, 0.000 | 50 | 1.54E−12 |
| Gm14:1723045 | G/C | 32:0, 0:20 | 1.000, 0.000 | 50 | 1.54E−12 |
| Gm14:1724087 | A/G | 32:0, 0:20 | 1.000, 0.000 | 50 | 1.54E−12 |
| Gm14:1724245 | A/G | 32:0, 0:20 | 1.000, 0.000 | 50 | 1.54E−12 |
| Gm14:1724558 | T/A | 32:0, 0:20 | 1.000, 0.000 | 50 | 1.54E−12 |
| Gm14:1724603 | T/C | 32:0, 0:20 | 1.000, 0.000 | 50 | 1.54E−12 |
| Gm14:1725318 | A/G | 32:0, 0:20 | 1.000, 0.000 | 50 | 1.54E−12 |
| Gm14:1726899 | A/T | 32:0, 0:20 | 1.000, 0.000 | 50 | 1.54E−12 |
| Gm14:1738054 | T/G | 32:0, 0:20 | 1.000, 0.000 | 50 | 1.54E−12 |
| Gm14:1784545 | A/G | 32:0, 0:20 | 1.000, 0.000 | 50 | 1.54E−12 |
| Gm14:1785276 | C/T | 32:0, 0:20 | 1.000, 0.000 | 50 | 1.54E−12 |
| Gm14:1793750 | C/T | 32:0, 0:20 | 1.000, 0.000 | 50 | 1.54E−12 |
| Gm14:1842226 | T/C | 32:0, 0:20 | 1.000, 0.000 | 50 | 1.54E−12 |
| Gm14:1850134 | T/C | 32:0, 0:20 | 1.000, 0.000 | 50 | 1.54E−12 |
| Gm14:1850654 | A/G | 32:0, 0:20 | 1.000, 0.000 | 50 | 1.54E−12 |
| Gm14:1850808 | C/T | 32:0, 0:20 | 1.000, 0.000 | 50 | 1.54E−12 |
| Gm14:1851180 | C/T | 32:0, 0:20 | 1.000, 0.000 | 50 | 1.54E−12 |
| Gm14:1851369 | G/C | 32:0, 0:20 | 1.000, 0.000 | 50 | 1.54E−12 |
| Gm14:1851467 | A/G | 32:0, 0:20 | 1.000, 0.000 | 50 | 1.54E−12 |
| Gm14:1851793 | C/T | 32:0, 0:20 | 1.000, 0.000 | 50 | 1.54E−12 |
| Gm14:1852388 | G/T | 32:0, 0:20 | 1.000, 0.000 | 50 | 1.54E−12 |
| Gm14:1852579 | C/T | 32:0, 0:20 | 1.000, 0.000 | 50 | 1.54E−12 |
| Gm14:1855401 | A/T | 32:0, 0:20 | 1.000, 0.000 | 50 | 1.54E−12 |
| Gm14:1867651 | A/G | 32:0, 0:20 | 1.000, 0.000 | 50 | 1.54E−12 |
| Gm14:1867913 | A/G | 32:0, 0:20 | 1.000, 0.000 | 50 | 1.54E−12 |
| Gm14:1867927 | C/G | 32:0, 0:20 | 1.000, 0.000 | 50 | 1.54E−12 |
| Gm14:1910547 | C/A | 32:0, 0:20 | 1.000, 0.000 | 50 | 1.54E−12 |
| Gm14:1910746 | T/A | 32:0, 0:20 | 1.000, 0.000 | 50 | 1.54E−12 |
| Gm14:1910787 | C/G | 32:0, 0:20 | 1.000, 0.000 | 50 | 1.54E−12 |
| Gm14:1911679 | A/T | 32:0, 0:20 | 1.000, 0.000 | 50 | 1.54E−12 |
| Gm14:1916729 | A/G | 32:0, 0:20 | 1.000, 0.000 | 50 | 1.54E−12 |
| Gm14:1916742 | T/A | 32:0, 0:20 | 1.000, 0.000 | 50 | 1.54E−12 |
| Gm14:1919121 | T/C | 32:0, 0:20 | 1.000, 0.000 | 50 | 1.54E−12 |
| Gm14:1934770 | C/T | 32:0, 0:20 | 1.000, 0.000 | 50 | 1.54E−12 |
| Gm14:1935561 | C/T | 32:0, 0:20 | 1.000, 0.000 | 50 | 1.54E−12 |
| Gm14:1935695 | G/A | 32:0, 0:20 | 1.000, 0.000 | 50 | 1.54E−12 |
| Gm14:1935949 | A/G | 32:0, 0:20 | 1.000, 0.000 | 50 | 1.54E−12 |
| Gm14:1936112 | T/A | 32:0, 0:20 | 1.000, 0.000 | 50 | 1.54E−12 |
| Gm14:1936619 | A/G | 32:0, 0:20 | 1.000, 0.000 | 50 | 1.54E−12 |
| Gm14:1936750 | T/A | 32:0, 0:20 | 1.000, 0.000 | 50 | 1.54E−12 |
| Gm14:1936804 | A/G | 32:0, 0:20 | 1.000, 0.000 | 50 | 1.54E−12 |
| Gm14:1936827 | G/A | 32:0, 0:20 | 1.000, 0.000 | 50 | 1.54E−12 |
| Gm14:1937070 | T/A | 32:0, 0:20 | 1.000, 0.000 | 50 | 1.54E−12 |
| Gm14:1937136 | C/T | 32:0, 0:20 | 1.000, 0.000 | 50 | 1.54E−12 |
| Gm14:1937495 | C/A | 32:0, 0:20 | 1.000, 0.000 | 50 | 1.54E−12 |
| Gm14:1938061 | A/G | 32:0, 0:20 | 1.000, 0.000 | 50 | 1.54E−12 |
| Gm14:1940079 | C/T | 32:0, 0:20 | 1.000, 0.000 | 50 | 1.54E−12 |
| Gm14:1940534 | T/C | 32:0, 0:20 | 1.000, 0.000 | 50 | 1.54E−12 |
| Gm14:1940728 | G/A | 32:0, 0:20 | 1.000, 0.000 | 50 | 1.54E−12 |
| Gm14:1940825 | C/T | 32:0, 0:20 | 1.000, 0.000 | 50 | 1.54E−12 |
| Gm14:1941047 | G/A | 32:0, 0:20 | 1.000, 0.000 | 50 | 1.54E−12 |
| Gm14:1941105 | G/T | 32:0, 0:20 | 1.000, 0.000 | 50 | 1.54E−12 |
| Gm14:1944642 | A/T | 32:0, 0:20 | 1.000, 0.000 | 50 | 1.54E−12 |
| Gm14:1700746 | T/C | 32:0, 0:20 | 1.000, 0.000 | 48 | 4.26E−12 |
| Gm14:1706616 | G/A | 32:0, 0:20 | 1.000, 0.000 | 48 | 4.26E−12 |
| Gm14:1706705 | G/A | 32:0, 0:20 | 1.000, 0.000 | 48 | 4.26E−12 |
| Gm14:1706782 | A/G | 32:0, 0:20 | 1.000, 0.000 | 48 | 4.26E−12 |
| Gm14:1708836 | C/T | 32:0, 0:20 | 1.000, 0.000 | 48 | 4.26E−12 |
| Gm14:1709816 | T/A | 32:0, 0:20 | 1.000, 0.000 | 48 | 4.26E−12 |
| Gm14:1712174 | T/A | 32:0, 0:20 | 1.000, 0.000 | 48 | 4.26E−12 |
| Gm14:1717270 | A/G | 32:0, 0:20 | 1.000, 0.000 | 48 | 4.26E−12 |
| Gm14:1722544 | C/T | 32:0, 0:20 | 1.000, 0.000 | 48 | 4.26E−12 |
| Gm14:1723756 | T/A | 32:0, 0:20 | 1.000, 0.000 | 48 | 4.26E−12 |
| Gm14:1725153 | T/C | 32:0, 0:20 | 1.000, 0.000 | 48 | 4.26E−12 |
| Gm14:1725269 | C/A | 32:0, 0:20 | 1.000, 0.000 | 48 | 4.26E−12 |
| Gm14:1726477 | G/C | 32:0, 0:20 | 1.000, 0.000 | 48 | 4.26E−12 |
| Gm14:1727084 | C/G | 32:0, 0:20 | 1.000, 0.000 | 48 | 4.26E−12 |
| Gm14:1731690 | C/T | 32:0, 0:20 | 1.000, 0.000 | 48 | 4.26E−12 |
| Gm14:1738538 | T/C | 32:0, 0:20 | 1.000, 0.000 | 48 | 4.26E−12 |
| Gm14:1739491 | T/G | 32:0, 0:20 | 1.000, 0.000 | 48 | 4.26E−12 |
| Gm14:1739824 | G/C | 32:0, 0:20 | 1.000, 0.000 | 48 | 4.26E−12 |
| Gm14:1785457 | G/C | 32:0, 0:20 | 1.000, 0.000 | 48 | 4.26E−12 |
| Gm14:1787260 | T/G | 32:0, 0:20 | 1.000, 0.000 | 48 | 4.26E−12 |
| Gm14:1796497 | T/G | 32:0, 0:20 | 1.000, 0.000 | 48 | 4.26E−12 |
| Gm14:1840314 | G/T | 32:0, 0:20 | 1.000, 0.000 | 48 | 4.26E−12 |
| Gm14:1842837 | A/G | 32:0, 0:20 | 1.000, 0.000 | 48 | 4.26E−12 |
| Gm14:1850412 | C/A | 32:0, 0:20 | 1.000, 0.000 | 48 | 4.26E−12 |
| Gm14:1850433 | T/A | 32:0, 0:20 | 1.000, 0.000 | 48 | 4.26E−12 |
| Gm14:1850907 | T/A | 32:0, 0:20 | 1.000, 0.000 | 48 | 4.26E−12 |
| Gm14:1851535 | T/A | 32:0, 0:20 | 1.000, 0.000 | 48 | 4.26E−12 |
| Gm14:1852210 | A/G | 32:0, 0:20 | 1.000, 0.000 | 48 | 4.26E−12 |
| Gm14:1859255 | C/T | 32:0, 0:20 | 1.000, 0.000 | 48 | 4.26E−12 |
| Gm14:1860411 | G/A | 32:0, 0:20 | 1.000, 0.000 | 48 | 4.26E−12 |
| Gm14:1909564 | T/C | 32:0, 0:20 | 1.000, 0.000 | 48 | 4.26E−12 |
| Gm14:1910968 | G/T | 32:0, 0:20 | 1.000, 0.000 | 48 | 4.26E−12 |
| Gm14:1935936 | A/G | 32:0, 0:20 | 1.000, 0.000 | 48 | 4.26E−12 |
| Gm14:1936214 | A/G | 32:0, 0:20 | 1.000, 0.000 | 48 | 4.26E−12 |
| Gm14:1936876 | G/A | 32:0, 0:20 | 1.000, 0.000 | 48 | 4.26E−12 |
| Gm14:1939030 | C/T | 32:0, 0:20 | 1.000, 0.000 | 48 | 4.26E−12 |
| Gm14:1939031 | T/A | 32:0, 0:20 | 1.000, 0.000 | 48 | 4.26E−12 |
| Gm14:1939081 | A/G | 32:0, 0:20 | 1.000, 0.000 | 48 | 4.26E−12 |
| Gm14:1940392 | A/C | 32:0, 0:20 | 1.000, 0.000 | 48 | 4.26E−12 |
| Gm14:1941517 | A/G | 32:0, 0:20 | 1.000, 0.000 | 48 | 4.26E−12 |
| Gm14:1989692 | G/A | 32:0, 0:20 | 1.000, 0.000 | 48 | 4.26E−12 |
| Gm14:1989717 | C/T | 32:0, 0:20 | 1.000, 0.000 | 48 | 4.26E−12 |
| Gm14:1992951 | T/A | 32:0, 0:20 | 1.000, 0.000 | 48 | 4.26E−12 |
| Gm14:2003498 | A/G | 32:0, 0:20 | 1.000, 0.000 | 48 | 4.26E−12 |
| Gm14:2004242 | A/G | 32:0, 0:20 | 1.000, 0.000 | 48 | 4.26E−12 |
| Gm14:2004409 | T/C | 32:0, 0:20 | 1.000, 0.000 | 48 | 4.26E−12 |
| Gm14:2006356 | A/T | 32:0, 0:20 | 1.000, 0.000 | 48 | 4.26E−12 |
| Gm14:1698254 | A/G | 32:0, 0:20 | 1.000, 0.000 | 46 | 1.18E−11 |
| Gm14:1698262 | T/C | 32:0, 0:20 | 1.000, 0.000 | 46 | 1.18E−11 |
| Gm14:1698269 | C/T | 32:0, 0:20 | 1.000, 0.000 | 46 | 1.18E−11 |
| Gm14:1701170 | T/A | 32:0, 0:20 | 1.000, 0.000 | 46 | 1.18E−11 |
| Gm14:1701174 | G/A | 32:0, 0:20 | 1.000, 0.000 | 46 | 1.18E−11 |
| Gm14:1701472 | T/A | 32:0, 0:20 | 1.000, 0.000 | 46 | 1.18E−11 |
| Gm14:1701825 | G/T | 32:0, 0:20 | 1.000, 0.000 | 46 | 1.18E−11 |
| Gm14:1702477 | A/T | 32:0, 0:20 | 1.000, 0.000 | 46 | 1.18E−11 |
| Gm14:1702552 | G/A | 32:0, 0:20 | 1.000, 0.000 | 46 | 1.18E−11 |
| Gm14:1702622 | T/C | 32:0, 0:20 | 1.000, 0.000 | 46 | 1.18E−11 |
| Gm14:1704204 | C/A | 32:0, 0:20 | 1.000, 0.000 | 46 | 1.18E−11 |
| Gm14:1705803 | A/G | 32:0, 0:20 | 1.000, 0.000 | 46 | 1.18E−11 |
| Gm14:1706201 | T/G | 32:0, 0:20 | 1.000, 0.000 | 46 | 1.18E−11 |
| Gm14:1706361 | C/T | 32:0, 0:20 | 1.000, 0.000 | 46 | 1.18E−11 |
| Gm14:1706585 | A/G | 32:0, 0:20 | 1.000, 0.000 | 46 | 1.18E−11 |
| Gm14:1706915 | T/C | 32:0, 0:20 | 1.000, 0.000 | 46 | 1.18E−11 |
| Gm14:1708746 | A/G | 32:0, 0:20 | 1.000, 0.000 | 46 | 1.18E−11 |
| Gm14:1713290 | A/T | 32:0, 0:20 | 1.000, 0.000 | 46 | 1.18E−11 |
| Gm14:1718056 | A/G | 32:0, 0:20 | 1.000, 0.000 | 46 | 1.18E−11 |
| Gm14:1718944 | A/G | 32:0, 0:20 | 1.000, 0.000 | 46 | 1.18E−11 |
| Gm14:1719373 | T/C | 32:0, 0:20 | 1.000, 0.000 | 46 | 1.18E−11 |
| Gm14:1723066 | A/C | 32:0, 0:20 | 1.000, 0.000 | 46 | 1.18E−11 |
| Gm14:1726434 | T/A | 32:0, 0:20 | 1.000, 0.000 | 46 | 1.18E−11 |
| Gm14:1726867 | G/A | 32:0, 0:20 | 1.000, 0.000 | 46 | 1.18E−11 |
| Gm14:1727235 | A/T | 32:0, 0:20 | 1.000, 0.000 | 46 | 1.18E−11 |
| Gm14:1728343 | G/A | 32:0, 0:20 | 1.000, 0.000 | 46 | 1.18E−11 |
| Gm14:1730044 | A/G | 32:0, 0:20 | 1.000, 0.000 | 46 | 1.18E−11 |
| Gm14:1731518 | T/G | 32:0, 0:20 | 1.000, 0.000 | 46 | 1.18E−11 |
| Gm14:1736053 | C/T | 32:0, 0:20 | 1.000, 0.000 | 46 | 1.18E−11 |
| Gm14:1738509 | C/T | 32:0, 0:20 | 1.000, 0.000 | 46 | 1.18E−11 |
| Gm14:1738914 | A/G | 32:0, 0:20 | 1.000, 0.000 | 46 | 1.18E−11 |
| Gm14:1739468 | C/T | 32:0, 0:20 | 1.000, 0.000 | 46 | 1.18E−11 |
| Gm14:1739718 | C/T | 32:0, 0:20 | 1.000, 0.000 | 46 | 1.18E−11 |
| Gm14:1739772 | T/G | 32:0, 0:20 | 1.000, 0.000 | 46 | 1.18E−11 |
| Gm14:1749899 | C/T | 32:0, 0:20 | 1.000, 0.000 | 46 | 1.18E−11 |
| Gm14:1785516 | A/G | 32:0, 0:20 | 1.000, 0.000 | 46 | 1.18E−11 |
| Gm14:1785559 | G/C | 32:0, 0:20 | 1.000, 0.000 | 46 | 1.18E−11 |
| Gm14:1786034 | T/G | 32:0, 0:20 | 1.000, 0.000 | 46 | 1.18E−11 |
| Gm14:1786259 | A/C | 32:0, 0:20 | 1.000, 0.000 | 46 | 1.18E−11 |
| Gm14:1793453 | A/G | 32:0, 0:20 | 1.000, 0.000 | 46 | 1.18E−11 |
| Gm14:1796469 | A/C | 32:0, 0:20 | 1.000, 0.000 | 46 | 1.18E−11 |
| Gm14:1797188 | A/G | 32:0, 0:20 | 1.000, 0.000 | 46 | 1.18E−11 |
| Gm14:1798987 | G/A | 32:0, 0:20 | 1.000, 0.000 | 46 | 1.18E−11 |
| Gm14:1800055 | A/G | 32:0, 0:20 | 1.000, 0.000 | 46 | 1.18E−11 |
| Gm14:1842374 | T/A | 32:0, 0:20 | 1.000, 0.000 | 46 | 1.18E−11 |
| Gm14:1850066 | A/G | 32:0, 0:20 | 1.000, 0.000 | 46 | 1.18E−11 |
| Gm14:1850741 | A/G | 32:0, 0:20 | 1.000, 0.000 | 46 | 1.18E−11 |
| Gm14:1850928 | C/T | 32:0, 0:20 | 1.000, 0.000 | 46 | 1.18E−11 |
| Gm14:1852469 | T/A | 32:0, 0:20 | 1.000, 0.000 | 46 | 1.18E−11 |
| Gm14:1854015 | G/A | 32:0, 0:20 | 1.000, 0.000 | 46 | 1.18E−11 |
| Gm14:1854023 | A/C | 32:0, 0:20 | 1.000, 0.000 | 46 | 1.18E−11 |
| Gm14:1859810 | T/A | 32:0, 0:20 | 1.000, 0.000 | 46 | 1.18E−11 |
| Gm14:1860271 | G/A | 32:0, 0:20 | 1.000, 0.000 | 46 | 1.18E−11 |
| Gm14:1862541 | G/A | 32:0, 0:20 | 1.000, 0.000 | 46 | 1.18E−11 |
| Gm14:1867332 | A/T | 32:0, 0:20 | 1.000, 0.000 | 46 | 1.18E−11 |
| Gm14:1868414 | C/A | 32:0, 0:20 | 1.000, 0.000 | 46 | 1.18E−11 |
| Gm14:1919937 | C/T | 32:0, 0:20 | 1.000, 0.000 | 46 | 1.18E−11 |
| Gm14:1935444 | T/C | 32:0, 0:20 | 1.000, 0.000 | 46 | 1.18E−11 |
| Gm14:1936433 | T/C | 32:0, 0:20 | 1.000, 0.000 | 46 | 1.18E−11 |
| Gm14:1937170 | G/A | 32:0, 0:20 | 1.000, 0.000 | 46 | 1.18E−11 |
| Gm14:1937923 | T/A | 32:0, 0:20 | 1.000, 0.000 | 46 | 1.18E−11 |
| Gm14:1938818 | T/C | 32:0, 0:20 | 1.000, 0.000 | 46 | 1.18E−11 |
| Gm14:1939343 | T/C | 32:0, 0:20 | 1.000, 0.000 | 46 | 1.18E−11 |
| Gm14:1939364 | T/C | 32:0, 0:20 | 1.000, 0.000 | 46 | 1.18E−11 |
| Gm14:1939647 | A/G | 32:0, 0:20 | 1.000, 0.000 | 46 | 1.18E−11 |
| Gm14:1939662 | T/A | 32:0, 0:20 | 1.000, 0.000 | 46 | 1.18E−11 |
| Gm14:1939746 | C/T | 32:0, 0:20 | 1.000, 0.000 | 46 | 1.18E−11 |
| Gm14:1939749 | G/A | 32:0, 0:20 | 1.000, 0.000 | 46 | 1.18E−11 |
| Gm14:1940207 | A/T | 32:0, 0:20 | 1.000, 0.000 | 46 | 1.18E−11 |
| Gm14:1940573 | A/G | 32:0, 0:20 | 1.000, 0.000 | 46 | 1.18E−11 |
| Gm14:1941546 | T/A | 32:0, 0:20 | 1.000, 0.000 | 46 | 1.18E−11 |
| Gm14:1945962 | A/T | 32:0, 0:20 | 1.000, 0.000 | 46 | 1.18E−11 |
| Gm14:1946355 | A/G | 32:0, 0:20 | 1.000, 0.000 | 46 | 1.18E−11 |
| Gm14:1990996 | A/G | 32:0, 0:20 | 1.000, 0.000 | 46 | 1.18E−11 |
| Gm14:1991421 | C/T | 32:0, 0:20 | 1.000, 0.000 | 46 | 1.18E−11 |
| Gm14:2001506 | T/C | 32:0, 0:20 | 1.000, 0.000 | 46 | 1.18E−11 |
| Gm14:2001882 | T/C | 32:0, 0:20 | 1.000, 0.000 | 46 | 1.18E−11 |
| Gm14:2003462 | G/A | 32:0, 0:20 | 1.000, 0.000 | 46 | 1.18E−11 |
| Gm14:2003672 | T/C | 32:0, 0:20 | 1.000, 0.000 | 46 | 1.18E−11 |
| Gm14:1697331 | C/T | 32:0, 0:20 | 1.000, 0.000 | 44 | 3.28E−11 |
| Gm14:1698694 | G/A | 32:0, 0:20 | 1.000, 0.000 | 44 | 3.28E−11 |
| Gm14:1700508 | C/T | 32:0, 0:20 | 1.000, 0.000 | 44 | 3.28E−11 |
| Gm14:1701739 | G/C | 32:0, 0:20 | 1.000, 0.000 | 44 | 3.28E−11 |
| Gm14:1701858 | G/T | 32:0, 0:20 | 1.000, 0.000 | 44 | 3.28E−11 |
| Gm14:1702110 | A/T | 32:0, 0:20 | 1.000, 0.000 | 44 | 3.28E−11 |
| Gm14:1702378 | C/T | 32:0, 0:20 | 1.000, 0.000 | 44 | 3.28E−11 |
| Gm14:1706884 | T/C | 32:0, 0:20 | 1.000, 0.000 | 44 | 3.28E−11 |
| Gm14:1706973 | T/C | 32:0, 0:20 | 1.000, 0.000 | 44 | 3.28E−11 |
| Gm14:1708902 | G/C | 32:0, 0:20 | 1.000, 0.000 | 44 | 3.28E−11 |
| Gm14:1711952 | T/A | 32:0, 0:20 | 1.000, 0.000 | 44 | 3.28E−11 |
| Gm14:1712050 | C/T | 32:0, 0:20 | 1.000, 0.000 | 44 | 3.28E−11 |
| Gm14:1712345 | A/C | 32:0, 0:20 | 1.000, 0.000 | 44 | 3.28E−11 |
| Gm14:1717261 | G/T | 32:0, 0:20 | 1.000, 0.000 | 44 | 3.28E−11 |
| Gm14:1722228 | T/C | 32:0, 0:20 | 1.000, 0.000 | 44 | 3.28E−11 |
| Gm14:1722277 | C/T | 32:0, 0:20 | 1.000, 0.000 | 44 | 3.28E−11 |
| Gm14:1723101 | C/T | 32:0, 0:20 | 1.000, 0.000 | 44 | 3.28E−11 |
| Gm14:1724793 | T/A | 32:0, 0:20 | 1.000, 0.000 | 44 | 3.28E−11 |
| Gm14:1725740 | G/A | 32:0, 0:20 | 1.000, 0.000 | 44 | 3.28E−11 |
| Gm14:1726334 | T/A | 32:0, 0:20 | 1.000, 0.000 | 44 | 3.28E−11 |
| Gm14:1727170 | T/C | 32:0, 0:20 | 1.000, 0.000 | 44 | 3.28E−11 |
| Gm14:1727625 | T/C | 32:0, 0:20 | 1.000, 0.000 | 44 | 3.28E−11 |
| Gm14:1730199 | C/T | 32:0, 0:20 | 1.000, 0.000 | 44 | 3.28E−11 |
| Gm14:1736329 | G/C | 32:0, 0:20 | 1.000, 0.000 | 44 | 3.28E−11 |
| Gm14:1736463 | G/A | 32:0, 0:20 | 1.000, 0.000 | 44 | 3.28E−11 |
| Gm14:1736832 | T/C | 32:0, 0:20 | 1.000, 0.000 | 44 | 3.28E−11 |
| Gm14:1737771 | G/C | 32:0, 0:20 | 1.000, 0.000 | 44 | 3.28E−11 |
| Gm14:1738824 | G/A | 32:0, 0:20 | 1.000, 0.000 | 44 | 3.28E−11 |
| Gm14:1738960 | A/C | 32:0, 0:20 | 1.000, 0.000 | 44 | 3.28E−11 |
| Gm14:1743818 | G/A | 32:0, 0:20 | 1.000, 0.000 | 44 | 3.28E−11 |
| Gm14:1756757 | G/T | 32:0, 0:20 | 1.000, 0.000 | 44 | 3.28E−11 |
| Gm14:1760506 | C/T | 32:0, 0:20 | 1.000, 0.000 | 44 | 3.28E−11 |
| Gm14:1778710 | T/A | 32:0, 0:20 | 1.000, 0.000 | 44 | 3.28E−11 |
| Gm14:1783716 | T/C | 32:0, 0:20 | 1.000, 0.000 | 44 | 3.28E−11 |
| Gm14:1784221 | T/A | 32:0, 0:20 | 1.000, 0.000 | 44 | 3.28E−11 |
| Gm14:1786098 | G/A | 32:0, 0:20 | 1.000, 0.000 | 44 | 3.28E−11 |
| Gm14:1797150 | A/T | 32:0, 0:20 | 1.000, 0.000 | 44 | 3.28E−11 |
| Gm14:1797155 | G/A | 32:0, 0:20 | 1.000, 0.000 | 44 | 3.28E−11 |
| Gm14:1799977 | T/G | 32:0, 0:20 | 1.000, 0.000 | 44 | 3.28E−11 |
| Gm14:1811618 | G/T | 32:0, 0:20 | 1.000, 0.000 | 44 | 3.28E−11 |
| Gm14:1812051 | C/G | 32:0, 0:20 | 1.000, 0.000 | 44 | 3.28E−11 |
| Gm14:1824464 | A/G | 32:0, 0:20 | 1.000, 0.000 | 44 | 3.28E−11 |
| Gm14:1839360 | T/A | 32:0, 0:20 | 1.000, 0.000 | 44 | 3.28E−11 |
| Gm14:1843408 | G/C | 32:0, 0:20 | 1.000, 0.000 | 44 | 3.28E−11 |
| Gm14:1850104 | T/C | 32:0, 0:20 | 1.000, 0.000 | 44 | 3.28E−11 |
| Gm14:1851115 | A/G | 32:0, 0:20 | 1.000, 0.000 | 44 | 3.28E−11 |
| Gm14:1851116 | G/A | 32:0, 0:20 | 1.000, 0.000 | 44 | 3.28E−11 |
| Gm14:1855960 | G/T | 32:0, 0:20 | 1.000, 0.000 | 44 | 3.28E−11 |
| Gm14:1858300 | C/T | 32:0, 0:20 | 1.000, 0.000 | 44 | 3.28E−11 |
| Gm14:1860243 | A/G | 32:0, 0:20 | 1.000, 0.000 | 44 | 3.28E−11 |
| Gm14:1860675 | C/A | 32:0, 0:20 | 1.000, 0.000 | 44 | 3.28E−11 |
| Gm14:1866981 | C/T | 32:0, 0:20 | 1.000, 0.000 | 44 | 3.28E−11 |
| Gm14:1869210 | C/A | 32:0, 0:20 | 1.000, 0.000 | 44 | 3.28E−11 |
| Gm14:1872625 | A/G | 32:0, 0:20 | 1.000, 0.000 | 44 | 3.28E−11 |
| Gm14:1902929 | C/T | 32:0, 0:20 | 1.000, 0.000 | 44 | 3.28E−11 |
| Gm14:1913544 | T/C | 32:0, 0:20 | 1.000, 0.000 | 44 | 3.28E−11 |
| Gm14:1914780 | T/C | 32:0, 0:20 | 1.000, 0.000 | 44 | 3.28E−11 |
| Gm14:1935408 | C/T | 32:0, 0:20 | 1.000, 0.000 | 44 | 3.28E−11 |
| Gm14:1936381 | C/T | 32:0, 0:20 | 1.000, 0.000 | 44 | 3.28E−11 |
| Gm14:1936425 | A/G | 32:0, 0:20 | 1.000, 0.000 | 44 | 3.28E−11 |
| Gm14:1939383 | G/A | 32:0, 0:20 | 1.000, 0.000 | 44 | 3.28E−11 |
| Gm14:1988977 | T/A | 32:0, 0:20 | 1.000, 0.000 | 44 | 3.28E−11 |
| Gm14:1989052 | A/T | 32:0, 0:20 | 1.000, 0.000 | 44 | 3.28E−11 |
| Gm14:1990632 | A/T | 32:0, 0:20 | 1.000, 0.000 | 44 | 3.28E−11 |
| Gm14:1990775 | A/G | 32:0, 0:20 | 1.000, 0.000 | 44 | 3.28E−11 |
| Gm14:1991550 | G/A | 32:0, 0:20 | 1.000, 0.000 | 44 | 3.28E−11 |
| Gm14:1999220 | C/T | 32:0, 0:20 | 1.000, 0.000 | 44 | 3.28E−11 |
| Gm14:2003981 | G/A | 32:0, 0:20 | 1.000, 0.000 | 44 | 3.28E−11 |
| Gm14:1697620 | G/T | 32:0, 0:20 | 1.000, 0.000 | 42 | 9.13E−11 |
| Gm14:1697978 | A/T | 32:0, 0:20 | 1.000, 0.000 | 42 | 9.13E−11 |
| Gm14:1699410 | A/G | 32:0, 0:20 | 1.000, 0.000 | 42 | 9.13E−11 |
| Gm14:1700636 | G/C | 32:0, 0:20 | 1.000, 0.000 | 42 | 9.13E−11 |
| Gm14:1701683 | C/T | 32:0, 0:20 | 1.000, 0.000 | 42 | 9.13E−11 |
| Gm14:1701935 | T/C | 32:0, 0:20 | 1.000, 0.000 | 42 | 9.13E−11 |
| Gm14:1702661 | T/C | 32:0, 0:20 | 1.000, 0.000 | 42 | 9.13E−11 |
| Gm14:1702755 | A/T | 32:0, 0:20 | 1.000, 0.000 | 42 | 9.13E−11 |
| Gm14:1704651 | C/T | 32:0, 0:20 | 1.000, 0.000 | 42 | 9.13E−11 |
| Gm14:1704664 | C/T | 32:0, 0:20 | 1.000, 0.000 | 42 | 9.13E−11 |
| Gm14:1712038 | A/G | 32:0, 0:20 | 1.000, 0.000 | 42 | 9.13E−11 |
| Gm14:1712320 | A/C | 32:0, 0:20 | 1.000, 0.000 | 42 | 9.13E−11 |
| Gm14:1712713 | A/G | 32:0, 0:20 | 1.000, 0.000 | 42 | 9.13E−11 |
| Gm14:1712865 | T/C | 32:0, 0:20 | 1.000, 0.000 | 42 | 9.13E−11 |
| Gm14:1712866 | A/T | 32:0, 0:20 | 1.000, 0.000 | 42 | 9.13E−11 |
| Gm14:1713999 | T/C | 32:0, 0:20 | 1.000, 0.000 | 42 | 9.13E−11 |
| Gm14:1719022 | T/G | 32:0, 0:20 | 1.000, 0.000 | 42 | 9.13E−11 |
| Gm14:1728216 | C/T | 32:0, 0:20 | 1.000, 0.000 | 42 | 9.13E−11 |
| Gm14:1731767 | T/C | 32:0, 0:20 | 1.000, 0.000 | 42 | 9.13E−11 |
| Gm14:1735093 | C/A | 32:0, 0:20 | 1.000, 0.000 | 42 | 9.13E−11 |
| Gm14:1735102 | T/A | 32:0, 0:20 | 1.000, 0.000 | 42 | 9.13E−11 |
| Gm14:1736945 | A/G | 32:0, 0:20 | 1.000, 0.000 | 42 | 9.13E−11 |
| Gm14:1743592 | G/A | 32:0, 0:20 | 1.000, 0.000 | 42 | 9.13E−11 |
| Gm14:1748064 | C/T | 32:0, 0:20 | 1.000, 0.000 | 42 | 9.13E−11 |
| Gm14:1749126 | C/A | 32:0, 0:20 | 1.000, 0.000 | 42 | 9.13E−11 |
| Gm14:1754686 | G/A | 32:0, 0:20 | 1.000, 0.000 | 42 | 9.13E−11 |
| Gm14:1757996 | C/G | 32:0, 0:20 | 1.000, 0.000 | 42 | 9.13E−11 |
| Gm14:1760483 | C/T | 32:0, 0:20 | 1.000, 0.000 | 42 | 9.13E−11 |
| Gm14:1783231 | T/A | 32:0, 0:20 | 1.000, 0.000 | 42 | 9.13E−11 |
| Gm14:1783538 | G/A | 32:0, 0:20 | 1.000, 0.000 | 42 | 9.13E−11 |
| Gm14:1783756 | T/G | 32:0, 0:20 | 1.000, 0.000 | 42 | 9.13E−11 |
| Gm14:1786013 | G/A | 32:0, 0:20 | 1.000, 0.000 | 42 | 9.13E−11 |
| Gm14:1787773 | A/G | 32:0, 0:20 | 1.000, 0.000 | 42 | 9.13E−11 |
| Gm14:1792218 | C/T | 32:0, 0:20 | 1.000, 0.000 | 42 | 9.13E−11 |
| Gm14:1799327 | A/T | 32:0, 0:20 | 1.000, 0.000 | 42 | 9.13E−11 |
| Gm14:1799390 | C/T | 32:0, 0:20 | 1.000, 0.000 | 42 | 9.13E−11 |
| Gm14:1799540 | T/C | 32:0, 0:20 | 1.000, 0.000 | 42 | 9.13E−11 |
| Gm14:1800012 | G/T | 32:0, 0:20 | 1.000, 0.000 | 42 | 9.13E−11 |
| Gm14:1800319 | T/G | 32:0, 0:20 | 1.000, 0.000 | 42 | 9.13E−11 |
| Gm14:1811113 | T/G | 32:0, 0:20 | 1.000, 0.000 | 42 | 9.13E−11 |
| Gm14:1811977 | G/A | 32:0, 0:20 | 1.000, 0.000 | 42 | 9.13E−11 |
| Gm14:1824284 | C/T | 32:0, 0:20 | 1.000, 0.000 | 42 | 9.13E−11 |
| Gm14:1837872 | C/T | 32:0, 0:20 | 1.000, 0.000 | 42 | 9.13E−11 |
| Gm14:1837888 | G/A | 32:0, 0:20 | 1.000, 0.000 | 42 | 9.13E−11 |
| Gm14:1851947 | G/A | 32:0, 0:20 | 1.000, 0.000 | 42 | 9.13E−11 |
| Gm14:1858277 | G/C | 32:0, 0:20 | 1.000, 0.000 | 42 | 9.13E−11 |
| Gm14:1861083 | A/T | 32:0, 0:20 | 1.000, 0.000 | 42 | 9.13E−11 |
| Gm14:1887021 | T/G | 32:0, 0:20 | 1.000, 0.000 | 42 | 9.13E−11 |
| Gm14:1903293 | C/T | 32:0, 0:20 | 1.000, 0.000 | 42 | 9.13E−11 |
| Gm14:1910033 | T/C | 32:0, 0:20 | 1.000, 0.000 | 42 | 9.13E−11 |
| Gm14:1919915 | A/G | 32:0, 0:20 | 1.000, 0.000 | 42 | 9.13E−11 |
| Gm14:1934737 | A/G | 32:0, 0:20 | 1.000, 0.000 | 42 | 9.13E−11 |
| Gm14:1946125 | A/G | 32:0, 0:20 | 1.000, 0.000 | 42 | 9.13E−11 |
| Gm14:1958086 | T/C | 32:0, 0:20 | 1.000, 0.000 | 42 | 9.13E−11 |
| Gm14:1986602 | T/C | 32:0, 0:20 | 1.000, 0.000 | 42 | 9.13E−11 |
| Gm14:1987892 | A/G | 32:0, 0:20 | 1.000, 0.000 | 42 | 9.13E−11 |
| Gm14:1988001 | G/A | 32:0, 0:20 | 1.000, 0.000 | 42 | 9.13E−11 |
| Gm14:1989951 | A/C | 32:0, 0:20 | 1.000, 0.000 | 42 | 9.13E−11 |
| Gm14:1991474 | A/C | 32:0, 0:20 | 1.000, 0.000 | 42 | 9.13E−11 |
| Gm14:1997517 | C/A | 32:0, 0:20 | 1.000, 0.000 | 42 | 9.13E−11 |
| Gm14:2006319 | C/G | 32:0, 0:20 | 1.000, 0.000 | 42 | 9.13E−11 |
| Gm14:2017162 | C/A | 32:0, 0:20 | 1.000, 0.000 | 42 | 9.13E−11 |
| Gm14:2019929 | A/G | 32:0, 0:20 | 1.000, 0.000 | 42 | 9.13E−11 |
| Gm14:1701692 | C/T | 32:0, 0:20 | 1.000, 0.000 | 40 | 2.54E−10 |
| Gm14:1702315 | A/T | 32:0, 0:20 | 1.000, 0.000 | 40 | 2.54E−10 |
| Gm14:1702956 | C/G | 32:0, 0:20 | 1.000, 0.000 | 40 | 2.54E−10 |
| Gm14:1703980 | A/C | 32:0, 0:20 | 1.000, 0.000 | 40 | 2.54E−10 |
| Gm14:1706523 | A/G | 32:0, 0:20 | 1.000, 0.000 | 40 | 2.54E−10 |
| Gm14:1711087 | C/A | 32:0, 0:20 | 1.000, 0.000 | 40 | 2.54E−10 |
| Gm14:1712377 | C/A | 32:0, 0:20 | 1.000, 0.000 | 40 | 2.54E−10 |
| Gm14:1714965 | G/A | 32:0, 0:20 | 1.000, 0.000 | 40 | 2.54E−10 |
| Gm14:1727031 | G/A | 32:0, 0:20 | 1.000, 0.000 | 40 | 2.54E−10 |
| Gm14:1727851 | A/T | 32:0, 0:20 | 1.000, 0.000 | 40 | 2.54E−10 |
| Gm14:1728741 | G/A | 32:0, 0:20 | 1.000, 0.000 | 40 | 2.54E−10 |
| Gm14:1729293 | A/G | 32:0, 0:20 | 1.000, 0.000 | 40 | 2.54E−10 |
| Gm14:1730480 | A/G | 32:0, 0:20 | 1.000, 0.000 | 40 | 2.54E−10 |
| Gm14:1730798 | A/T | 32:0, 0:20 | 1.000, 0.000 | 40 | 2.54E−10 |
| Gm14:1731840 | G/A | 32:0, 0:20 | 1.000, 0.000 | 40 | 2.54E−10 |
| Gm14:1732232 | G/A | 32:0, 0:20 | 1.000, 0.000 | 40 | 2.54E−10 |
| Gm14:1732358 | G/A | 32:0, 0:20 | 1.000, 0.000 | 40 | 2.54E−10 |
| Gm14:1732363 | T/G | 32:0, 0:20 | 1.000, 0.000 | 40 | 2.54E−10 |
| Gm14:1732403 | T/C | 32:0, 0:20 | 1.000, 0.000 | 40 | 2.54E−10 |
| Gm14:1735755 | T/C | 32:0, 0:20 | 1.000, 0.000 | 40 | 2.54E−10 |
| Gm14:1735945 | T/C | 32:0, 0:20 | 1.000, 0.000 | 40 | 2.54E−10 |
| Gm14:1743425 | A/G | 32:0, 0:20 | 1.000, 0.000 | 40 | 2.54E−10 |
| Gm14:1744356 | T/C | 32:0, 0:20 | 1.000, 0.000 | 40 | 2.54E−10 |
| Gm14:1746573 | T/C | 32:0, 0:20 | 1.000, 0.000 | 40 | 2.54E−10 |
| Gm14:1748959 | A/C | 32:0, 0:20 | 1.000, 0.000 | 40 | 2.54E−10 |
| Gm14:1750564 | G/C | 32:0, 0:20 | 1.000, 0.000 | 40 | 2.54E−10 |
| Gm14:1753875 | G/A | 32:0, 0:20 | 1.000, 0.000 | 40 | 2.54E−10 |
| Gm14:1754007 | A/G | 32:0, 0:20 | 1.000, 0.000 | 40 | 2.54E−10 |
| Gm14:1755671 | C/T | 32:0, 0:20 | 1.000, 0.000 | 40 | 2.54E−10 |
| Gm14:1756046 | G/T | 32:0, 0:20 | 1.000, 0.000 | 40 | 2.54E−10 |
| Gm14:1760299 | T/G | 32:0, 0:20 | 1.000, 0.000 | 40 | 2.54E−10 |
| Gm14:1760329 | A/G | 32:0, 0:20 | 1.000, 0.000 | 40 | 2.54E−10 |
| Gm14:1761362 | G/T | 32:0, 0:20 | 1.000, 0.000 | 40 | 2.54E−10 |
| Gm14:1766162 | T/G | 32:0, 0:20 | 1.000, 0.000 | 40 | 2.54E−10 |
| Gm14:1780165 | G/T | 32:0, 0:20 | 1.000, 0.000 | 40 | 2.54E−10 |
| Gm14:1780408 | G/A | 32:0, 0:20 | 1.000, 0.000 | 40 | 2.54E−10 |
| Gm14:1782983 | C/A | 32:0, 0:20 | 1.000, 0.000 | 40 | 2.54E−10 |
| Gm14:1789475 | G/T | 32:0, 0:20 | 1.000, 0.000 | 40 | 2.54E−10 |
| Gm14:1799494 | C/G | 32:0, 0:20 | 1.000, 0.000 | 40 | 2.54E−10 |
| Gm14:1799548 | C/T | 32:0, 0:20 | 1.000, 0.000 | 40 | 2.54E−10 |
| Gm14:1799571 | A/G | 32:0, 0:20 | 1.000, 0.000 | 40 | 2.54E−10 |
| Gm14:1811318 | A/T | 32:0, 0:20 | 1.000, 0.000 | 40 | 2.54E−10 |
| Gm14:1825691 | T/C | 32:0, 0:20 | 1.000, 0.000 | 40 | 2.54E−10 |
| Gm14:1834023 | G/A | 32:0, 0:20 | 1.000, 0.000 | 40 | 2.54E−10 |
| Gm14:1841281 | G/A | 32:0, 0:20 | 1.000, 0.000 | 40 | 2.54E−10 |
| Gm14:1846850 | T/C | 32:0, 0:20 | 1.000, 0.000 | 40 | 2.54E−10 |
| Gm14:1887108 | G/A | 32:0, 0:20 | 1.000, 0.000 | 40 | 2.54E−10 |
| Gm14:1887251 | T/C | 32:0, 0:20 | 1.000, 0.000 | 40 | 2.54E−10 |
| Gm14:1935369 | C/T | 32:0, 0:20 | 1.000, 0.000 | 40 | 2.54E−10 |
| Gm14:1969791 | A/G | 32:0, 0:20 | 1.000, 0.000 | 40 | 2.54E−10 |
| Gm14:1981574 | G/C | 32:0, 0:20 | 1.000, 0.000 | 40 | 2.54E−10 |
| Gm14:1981644 | G/A | 32:0, 0:20 | 1.000, 0.000 | 40 | 2.54E−10 |
| Gm14:1983907 | G/T | 32:0, 0:20 | 1.000, 0.000 | 40 | 2.54E−10 |
| Gm14:1986614 | C/G | 32:0, 0:20 | 1.000, 0.000 | 40 | 2.54E−10 |
| Gm14:1986675 | G/A | 32:0, 0:20 | 1.000, 0.000 | 40 | 2.54E−10 |
| Gm14:1987587 | A/T | 32:0, 0:20 | 1.000, 0.000 | 40 | 2.54E−10 |
| Gm14:1988422 | T/G | 32:0, 0:20 | 1.000, 0.000 | 40 | 2.54E−10 |
| Gm14:1988424 | C/T | 32:0, 0:20 | 1.000, 0.000 | 40 | 2.54E−10 |
| Gm14:1988520 | T/C | 32:0, 0:20 | 1.000, 0.000 | 40 | 2.54E−10 |
| Gm14:1988558 | G/A | 32:0, 0:20 | 1.000, 0.000 | 40 | 2.54E−10 |
| Gm14:1989403 | G/T | 32:0, 0:20 | 1.000, 0.000 | 40 | 2.54E−10 |
| Gm14:1991457 | C/T | 32:0, 0:20 | 1.000, 0.000 | 40 | 2.54E−10 |
| Gm14:1991910 | T/G | 32:0, 0:20 | 1.000, 0.000 | 40 | 2.54E−10 |
| Gm14:1992830 | T/C | 32:0, 0:20 | 1.000, 0.000 | 40 | 2.54E−10 |
| Gm14:1993931 | T/G | 32:0, 0:20 | 1.000, 0.000 | 40 | 2.54E−10 |
| Gm14:1997124 | A/G | 32:0, 0:20 | 1.000, 0.000 | 40 | 2.54E−10 |
| Gm14:1998879 | C/T | 32:0, 0:20 | 1.000, 0.000 | 40 | 2.54E−10 |
| Gm14:2004939 | G/A | 32:0, 0:20 | 1.000, 0.000 | 40 | 2.54E−10 |
| Gm14:2005896 | C/T | 32:0, 0:20 | 1.000, 0.000 | 40 | 2.54E−10 |
| Gm14:1698816 | A/G | 32:0, 0:20 | 1.000, 0.000 | 38 | 7.07E−10 |
| Gm14:1701991 | G/A | 32:0, 0:20 | 1.000, 0.000 | 38 | 7.07E−10 |
| Gm14:1710294 | G/A | 32:0, 0:20 | 1.000, 0.000 | 38 | 7.07E−10 |
| Gm14:1710303 | C/G | 32:0, 0:20 | 1.000, 0.000 | 38 | 7.07E−10 |
| Gm14:1711007 | G/T | 32:0, 0:20 | 1.000, 0.000 | 38 | 7.07E−10 |
| Gm14:1711575 | C/T | 32:0, 0:20 | 1.000, 0.000 | 38 | 7.07E−10 |
| Gm14:1713816 | G/C | 32:0, 0:20 | 1.000, 0.000 | 38 | 7.07E−10 |
| Gm14:1728293 | G/T | 32:0, 0:20 | 1.000, 0.000 | 38 | 7.07E−10 |
| Gm14:1729743 | A/G | 32:0, 0:20 | 1.000, 0.000 | 38 | 7.07E−10 |
| Gm14:1730281 | A/G | 32:0, 0:20 | 1.000, 0.000 | 38 | 7.07E−10 |
| Gm14:1730795 | G/T | 32:0, 0:20 | 1.000, 0.000 | 38 | 7.07E−10 |
| Gm14:1732205 | G/C | 32:0, 0:20 | 1.000, 0.000 | 38 | 7.07E−10 |
| Gm14:1744432 | A/G | 32:0, 0:20 | 1.000, 0.000 | 38 | 7.07E−10 |
| Gm14:1751350 | G/A | 32:0, 0:20 | 1.000, 0.000 | 38 | 7.07E−10 |
| Gm14:1755250 | C/T | 32:0, 0:20 | 1.000, 0.000 | 38 | 7.07E−10 |
| Gm14:1755398 | T/A | 32:0, 0:20 | 1.000, 0.000 | 38 | 7.07E−10 |
| Gm14:1756188 | G/A | 32:0, 0:20 | 1.000, 0.000 | 38 | 7.07E−10 |
| Gm14:1761081 | A/G | 32:0, 0:20 | 1.000, 0.000 | 38 | 7.07E−10 |
| Gm14:1761387 | A/G | 32:0, 0:20 | 1.000, 0.000 | 38 | 7.07E−10 |
| Gm14:1762867 | A/G | 32:0, 0:20 | 1.000, 0.000 | 38 | 7.07E−10 |
| Gm14:1765302 | G/A | 32:0, 0:20 | 1.000, 0.000 | 38 | 7.07E−10 |
| Gm14:1777323 | T/A | 32:0, 0:20 | 1.000, 0.000 | 38 | 7.07E−10 |
| Gm14:1779323 | A/G | 32:0, 0:20 | 1.000, 0.000 | 38 | 7.07E−10 |
| Gm14:1780397 | A/T | 32:0, 0:20 | 1.000, 0.000 | 38 | 7.07E−10 |
| Gm14:1800359 | C/T | 32:0, 0:20 | 1.000, 0.000 | 38 | 7.07E−10 |
| Gm14:1803234 | A/C | 32:0, 0:20 | 1.000, 0.000 | 38 | 7.07E−10 |
| Gm14:1811158 | A/G | 32:0, 0:20 | 1.000, 0.000 | 38 | 7.07E−10 |
| Gm14:1825653 | G/A | 32:0, 0:20 | 1.000, 0.000 | 38 | 7.07E−10 |
| Gm14:1869500 | G/A | 32:0, 0:20 | 1.000, 0.000 | 38 | 7.07E−10 |
| Gm14:1876026 | T/C | 32:0, 0:20 | 1.000, 0.000 | 38 | 7.07E−10 |
| Gm14:1876675 | G/A | 32:0, 0:20 | 1.000, 0.000 | 38 | 7.07E−10 |
| Gm14:1876844 | G/A | 32:0, 0:20 | 1.000, 0.000 | 38 | 7.07E−10 |
| Gm14:1876847 | G/T | 32:0, 0:20 | 1.000, 0.000 | 38 | 7.07E−10 |
| Gm14:1879162 | A/T | 32:0, 0:20 | 1.000, 0.000 | 38 | 7.07E−10 |
| Gm14:1884603 | T/C | 32:0, 0:20 | 1.000, 0.000 | 38 | 7.07E−10 |
| Gm14:1904675 | A/G | 32:0, 0:20 | 1.000, 0.000 | 38 | 7.07E−10 |
| Gm14:1944708 | T/C | 32:0, 0:20 | 1.000, 0.000 | 38 | 7.07E−10 |
| Gm14:1954056 | C/T | 32:0, 0:20 | 1.000, 0.000 | 38 | 7.07E−10 |
| Gm14:1954062 | T/G | 32:0, 0:20 | 1.000, 0.000 | 38 | 7.07E−10 |
| Gm14:1967108 | A/G | 32:0, 0:20 | 1.000, 0.000 | 38 | 7.07E−10 |
| Gm14:1972107 | C/A | 32:0, 0:20 | 1.000, 0.000 | 38 | 7.07E−10 |
| Gm14:2006215 | C/T | 32:0, 0:20 | 1.000, 0.000 | 38 | 7.07E−10 |
| Gm14:2011465 | G/C | 32:0, 0:20 | 1.000, 0.000 | 38 | 7.07E−10 |
| Gm14:1704689 | G/A | 32:0, 0:20 | 1.000, 0.000 | 36 | 1.97E−10 |
| Gm14:1711569 | G/A | 32:0, 0:20 | 1.000, 0.000 | 36 | 1.97E−10 |
| Gm14:1713323 | A/C | 32:0, 0:20 | 1.000, 0.000 | 36 | 1.97E−10 |
| Gm14:1728052 | G/A | 32:0, 0:20 | 1.000, 0.000 | 36 | 1.97E−10 |
| Gm14:1729537 | T/C | 32:0, 0:20 | 1.000, 0.000 | 36 | 1.97E−10 |
| Gm14:1732261 | T/A | 32:0, 0:20 | 1.000, 0.000 | 36 | 1.97E−10 |
| Gm14:1732593 | A/G | 32:0, 0:20 | 1.000, 0.000 | 36 | 1.97E−10 |
| Gm14:1735227 | A/C | 32:0, 0:20 | 1.000, 0.000 | 36 | 1.97E−10 |
| Gm14:1744452 | A/G | 32:0, 0:20 | 1.000, 0.000 | 36 | 1.97E−10 |
| Gm14:1754156 | A/G | 32:0, 0:20 | 1.000, 0.000 | 36 | 1.97E−10 |
| Gm14:1755877 | A/G | 32:0, 0:20 | 1.000, 0.000 | 36 | 1.97E−10 |
| Gm14:1756355 | C/A | 32:0, 0:20 | 1.000, 0.000 | 36 | 1.97E−10 |
| Gm14:1759702 | A/G | 32:0, 0:20 | 1.000, 0.000 | 36 | 1.97E−10 |
| Gm14:1780316 | A/G | 32:0, 0:20 | 1.000, 0.000 | 36 | 1.97E−10 |
| Gm14:1801585 | G/T | 32:0, 0:20 | 1.000, 0.000 | 36 | 1.97E−10 |
| Gm14:1810099 | A/G | 32:0, 0:20 | 1.000, 0.000 | 36 | 1.97E−10 |
| Gm14:1810126 | A/G | 32:0, 0:20 | 1.000, 0.000 | 36 | 1.97E−10 |
| Gm14:1810421 | C/T | 32:0, 0:20 | 1.000, 0.000 | 36 | 1.97E−10 |
| Gm14:1823776 | C/G | 32:0, 0:20 | 1.000, 0.000 | 36 | 1.97E−10 |
| Gm14:1875278 | T/A | 32:0, 0:20 | 1.000, 0.000 | 36 | 1.97E−10 |
| Gm14:1875874 | T/G | 32:0, 0:20 | 1.000, 0.000 | 36 | 1.97E−10 |
| Gm14:1902961 | G/A | 32:0, 0:20 | 1.000, 0.000 | 36 | 1.97E−10 |
| Gm14:1910054 | A/T | 32:0, 0:20 | 1.000, 0.000 | 36 | 1.97E−10 |
| Gm14:1949216 | T/A | 32:0, 0:20 | 1.000, 0.000 | 36 | 1.97E−10 |
| Gm14:1957357 | G/C | 32:0, 0:20 | 1.000, 0.000 | 36 | 1.97E−10 |
| Gm14:1957358 | A/T | 32:0, 0:20 | 1.000, 0.000 | 36 | 1.97E−10 |
| Gm14:1960447 | A/T | 32:0, 0:20 | 1.000, 0.000 | 36 | 1.97E−10 |
| Gm14:1980728 | C/T | 32:0, 0:20 | 1.000, 0.000 | 36 | 1.97E−10 |
| Gm14:1984129 | G/C | 32:0, 0:20 | 1.000, 0.000 | 36 | 1.97E−10 |
| Gm14:1992331 | C/T | 32:0, 0:20 | 1.000, 0.000 | 36 | 1.97E−10 |
| Gm14:1993147 | T/G | 32:0, 0:20 | 1.000, 0.000 | 36 | 1.97E−10 |
| Gm14:1995593 | G/A | 32:0, 0:20 | 1.000, 0.000 | 36 | 1.97E−10 |
| Gm14:1995600 | T/C | 32:0, 0:20 | 1.000, 0.000 | 36 | 1.97E−10 |
| Gm14:1996952 | G/T | 32:0, 0:20 | 1.000, 0.000 | 36 | 1.97E−10 |
| Gm14:1997412 | G/C | 32:0, 0:20 | 1.000, 0.000 | 36 | 1.97E−10 |
| Gm14:2004591 | T/A | 32:0, 0:20 | 1.000, 0.000 | 36 | 1.97E−10 |
| Gm14:1645762 | G/A | 32:0, 0:20 | 1.000, 0.000 | 34 | 5.51E−09 |
| Gm14:1713775 | T/C | 32:0, 0:20 | 1.000, 0.000 | 34 | 5.51E−09 |
| Gm14:1716505 | C/A | 32:0, 0:20 | 1.000, 0.000 | 34 | 5.51E−09 |
| Gm14:1729186 | A/G | 32:0, 0:20 | 1.000, 0.000 | 34 | 5.51E−09 |
| Gm14:1729798 | A/C | 32:0, 0:20 | 1.000, 0.000 | 34 | 5.51E−09 |
| Gm14:1732529 | A/G | 32:0, 0:20 | 1.000, 0.000 | 34 | 5.51E−09 |
| Gm14:1753922 | T/G | 32:0, 0:20 | 1.000, 0.000 | 34 | 5.51E−09 |
| Gm14:1755572 | A/C | 32:0, 0:20 | 1.000, 0.000 | 34 | 5.51E−09 |
| Gm14:1759619 | C/T | 32:0, 0:20 | 1.000, 0.000 | 34 | 5.51E−09 |
| Gm14:1759635 | C/T | 32:0, 0:20 | 1.000, 0.000 | 34 | 5.51E−09 |
| Gm14:1760144 | A/T | 32:0, 0:20 | 1.000, 0.000 | 34 | 5.51E−09 |
| Gm14:1761168 | T/G | 32:0, 0:20 | 1.000, 0.000 | 34 | 5.51E−09 |
| Gm14:1771612 | C/A | 32:0, 0:20 | 1.000, 0.000 | 34 | 5.51E−09 |
| Gm14:1777105 | T/A | 32:0, 0:20 | 1.000, 0.000 | 34 | 5.51E−09 |
| Gm14:1778517 | T/C | 32:0, 0:20 | 1.000, 0.000 | 34 | 5.51E−09 |
| Gm14:1779288 | T/C | 32:0, 0:20 | 1.000, 0.000 | 34 | 5.51E−09 |
| Gm14:1779568 | A/G | 32:0, 0:20 | 1.000, 0.000 | 34 | 5.51E−09 |
| Gm14:1804682 | A/C | 32:0, 0:20 | 1.000, 0.000 | 34 | 5.51E−09 |
| Gm14:1810135 | A/G | 32:0, 0:20 | 1.000, 0.000 | 34 | 5.51E−09 |
| Gm14:1825225 | G/T | 32:0, 0:20 | 1.000, 0.000 | 34 | 5.51E−09 |
| Gm14:1828925 | G/T | 32:0, 0:20 | 1.000, 0.000 | 34 | 5.51E−09 |
| Gm14:1846994 | G/C | 32:0, 0:20 | 1.000, 0.000 | 34 | 5.51E−09 |
| Gm14:1848374 | A/T | 32:0, 0:20 | 1.000, 0.000 | 34 | 5.51E−09 |
| Gm14:1874941 | T/C | 32:0, 0:20 | 1.000, 0.000 | 34 | 5.51E−09 |
| Gm14:1875261 | G/A | 32:0, 0:20 | 1.000, 0.000 | 34 | 5.51E−09 |
| Gm14:1875470 | A/G | 32:0, 0:20 | 1.000, 0.000 | 34 | 5.51E−09 |
| Gm14:1879189 | C/T | 32:0, 0:20 | 1.000, 0.000 | 34 | 5.51E−09 |
| Gm14:1881168 | G/C | 32:0, 0:20 | 1.000, 0.000 | 34 | 5.51E−09 |
| Gm14:1923548 | A/T | 32:0, 0:20 | 1.000, 0.000 | 34 | 5.51E−09 |
| Gm14:1923935 | T/C | 32:0, 0:20 | 1.000, 0.000 | 34 | 5.51E−09 |
| Gm14:1955048 | G/A | 32:0, 0:20 | 1.000, 0.000 | 34 | 5.51E−09 |
| Gm14:1955118 | C/A | 32:0, 0:20 | 1.000, 0.000 | 34 | 5.51E−09 |
| Gm14:1955144 | T/C | 32:0, 0:20 | 1.000, 0.000 | 34 | 5.51E−09 |
| Gm14:1959610 | T/G | 32:0, 0:20 | 1.000, 0.000 | 34 | 5.51E−09 |
| Gm14:1960454 | A/C | 32:0, 0:20 | 1.000, 0.000 | 34 | 5.51E−09 |
| Gm14:1967167 | T/G | 32:0, 0:20 | 1.000, 0.000 | 34 | 5.51E−09 |
| Gm14:1970908 | C/T | 32:0, 0:20 | 1.000, 0.000 | 34 | 5.51E−09 |
| Gm14:1976442 | G/T | 32:0, 0:20 | 1.000, 0.000 | 34 | 5.51E−09 |
| Gm14:1981936 | C/A | 32:0, 0:20 | 1.000, 0.000 | 34 | 5.51E−09 |
| Gm14:1982632 | C/T | 32:0, 0:20 | 1.000, 0.000 | 34 | 5.51E−09 |
| Gm14:1982756 | C/T | 32:0, 0:20 | 1.000, 0.000 | 34 | 5.51E−09 |
| Gm14:1984276 | G/T | 32:0, 0:20 | 1.000, 0.000 | 34 | 5.51E−09 |
| Gm14:1994907 | A/T | 32:0, 0:20 | 1.000, 0.000 | 34 | 5.51E−09 |
| Gm14:2013156 | G/T | 32:0, 0:20 | 1.000, 0.000 | 34 | 5.51E−09 |
| Gm14:2019411 | A/G | 32:0, 0:20 | 1.000, 0.000 | 34 | 5.51E−09 |
| Gm14:1711379 | G/A | 32:0, 0:20 | 1.000, 0.000 | 32 | 1.54E−09 |
| Gm14:1713140 | T/C | 32:0, 0:20 | 1.000, 0.000 | 32 | 1.54E−09 |
| Gm14:1727997 | G/A | 32:0, 0:20 | 1.000, 0.000 | 32 | 1.54E−09 |
| Gm14:1744286 | A/G | 32:0, 0:20 | 1.000, 0.000 | 32 | 1.54E−09 |
| Gm14:1757864 | T/C | 32:0, 0:20 | 1.000, 0.000 | 32 | 1.54E−09 |
| Gm14:1759363 | C/T | 32:0, 0:20 | 1.000, 0.000 | 32 | 1.54E−09 |
| Gm14:1765933 | A/G | 32:0, 0:20 | 1.000, 0.000 | 32 | 1.54E−09 |
| Gm14:1767525 | C/T | 32:0, 0:20 | 1.000, 0.000 | 32 | 1.54E−09 |
| Gm14:1767582 | C/G | 32:0, 0:20 | 1.000, 0.000 | 32 | 1.54E−09 |
| Gm14:1768845 | C/T | 32:0, 0:20 | 1.000, 0.000 | 32 | 1.54E−09 |
| Gm14:1775564 | T/A | 32:0, 0:20 | 1.000, 0.000 | 32 | 1.54E−09 |
| Gm14:1778106 | G/A | 32:0, 0:20 | 1.000, 0.000 | 32 | 1.54E−09 |
| Gm14:1778621 | T/C | 32:0, 0:20 | 1.000, 0.000 | 32 | 1.54E−09 |
| Gm14:1780281 | T/C | 32:0, 0:20 | 1.000, 0.000 | 32 | 1.54E−09 |
| Gm14:1780494 | G/A | 32:0, 0:20 | 1.000, 0.000 | 32 | 1.54E−09 |
| Gm14:1805372 | C/T | 32:0, 0:20 | 1.000, 0.000 | 32 | 1.54E−09 |
| Gm14:1809090 | A/T | 32:0, 0:20 | 1.000, 0.000 | 32 | 1.54E−09 |
| Gm14:1810313 | G/A | 32:0, 0:20 | 1.000, 0.000 | 32 | 1.54E−09 |
| Gm14:1812109 | T/A | 32:0, 0:20 | 1.000, 0.000 | 32 | 1.54E−09 |
| Gm14:1812114 | A/T | 32:0, 0:20 | 1.000, 0.000 | 32 | 1.54E−09 |
| Gm14:1824651 | A/G | 32:0, 0:20 | 1.000, 0.000 | 32 | 1.54E−09 |
| Gm14:1875656 | A/G | 32:0, 0:20 | 1.000, 0.000 | 32 | 1.54E−09 |
| Gm14:1877489 | G/T | 32:0, 0:20 | 1.000, 0.000 | 32 | 1.54E−09 |
| Gm14:1878068 | T/C | 32:0, 0:20 | 1.000, 0.000 | 32 | 1.54E−09 |
| Gm14:1903061 | G/A | 32:0, 0:20 | 1.000, 0.000 | 32 | 1.54E−09 |
| Gm14:1950278 | A/G | 32:0, 0:20 | 1.000, 0.000 | 32 | 1.54E−09 |
| Gm14:1950577 | C/G | 32:0, 0:20 | 1.000, 0.000 | 32 | 1.54E−09 |
| Gm14:1950969 | G/A | 32:0, 0:20 | 1.000, 0.000 | 32 | 1.54E−09 |
| Gm14:1970110 | T/A | 32:0, 0:20 | 1.000, 0.000 | 32 | 1.54E−09 |
| Gm14:1982411 | C/T | 32:0, 0:20 | 1.000, 0.000 | 32 | 1.54E−09 |
| Gm14:1983489 | T/C | 32:0, 0:20 | 1.000, 0.000 | 32 | 1.54E−09 |
| Gm14:1983507 | T/C | 32:0, 0:20 | 1.000, 0.000 | 32 | 1.54E−09 |
| Gm14:1983593 | T/C | 32:0, 0:20 | 1.000, 0.000 | 32 | 1.54E−09 |
| Gm14:1993730 | G/A | 32:0, 0:20 | 1.000, 0.000 | 32 | 1.54E−09 |
| Gm14:1993788 | T/G | 32:0, 0:20 | 1.000, 0.000 | 32 | 1.54E−09 |
| Gm14:1993806 | A/G | 32:0, 0:20 | 1.000, 0.000 | 32 | 1.54E−09 |
| Gm14:2006229 | C/T | 32:0, 0:20 | 1.000, 0.000 | 32 | 1.54E−09 |
| Gm14:2015853 | C/A | 32:0, 0:20 | 1.000, 0.000 | 32 | 1.54E−09 |
| Gm14:2359579 | G/A | 32:0, 0:20 | 1.000, 0.000 | 32 | 1.54E−09 |
| Gm14:1579650 | G/A | 32:0, 0:20 | 1.000, 0.000 | 30 | 4.32E−08 |
| Gm14:1764334 | T/C | 32:0, 0:20 | 1.000, 0.000 | 30 | 4.32E−08 |
| Gm14:1764392 | G/A | 32:0, 0:20 | 1.000, 0.000 | 30 | 4.32E−08 |
| Gm14:1764403 | T/C | 32:0, 0:20 | 1.000, 0.000 | 30 | 4.32E−08 |
| Gm14:1767878 | C/T | 32:0, 0:20 | 1.000, 0.000 | 30 | 4.32E−08 |
| Gm14:1805366 | T/G | 32:0, 0:20 | 1.000, 0.000 | 30 | 4.32E−08 |
| Gm14:1825173 | A/G | 32:0, 0:20 | 1.000, 0.000 | 30 | 4.32E−08 |
| Gm14:1879313 | C/T | 32:0, 0:20 | 1.000, 0.000 | 30 | 4.32E−08 |
| Gm14:1886238 | G/C | 32:0, 0:20 | 1.000, 0.000 | 30 | 4.32E−08 |
| Gm14:1899408 | G/T | 32:0, 0:20 | 1.000, 0.000 | 30 | 4.32E−08 |
| Gm14:1960137 | G/A | 32:0, 0:20 | 1.000, 0.000 | 30 | 4.32E−08 |
| Gm14:1971009 | G/C | 32:0, 0:20 | 1.000, 0.000 | 30 | 4.32E−08 |
| Gm14:1983348 | T/G | 32:0, 0:20 | 1.000, 0.000 | 30 | 4.32E−08 |
| Gm14:2011607 | C/A | 32:0, 0:20 | 1.000, 0.000 | 30 | 4.32E−08 |
| Gm14:2012105 | C/T | 32:0, 0:20 | 1.000, 0.000 | 30 | 4.32E−08 |
| Gm14:2340746 | A/C | 32:0, 0:20 | 1.000, 0.000 | 30 | 4.32E−08 |
| Gm14:1767671 | C/A | 32:0, 0:20 | 1.000, 0.000 | 28 | 1.21E−07 |
| Gm14:1771502 | A/G | 32:0, 0:20 | 1.000, 0.000 | 28 | 1.21E−07 |
| Gm14:1771578 | A/C | 32:0, 0:20 | 1.000, 0.000 | 28 | 1.21E−07 |
| Gm14:1803995 | G/A | 32:0, 0:20 | 1.000, 0.000 | 28 | 1.21E−07 |
| Gm14:1805322 | G/A | 32:0, 0:20 | 1.000, 0.000 | 28 | 1.21E−07 |
| Gm14:1809988 | C/T | 32:0, 0:20 | 1.000, 0.000 | 28 | 1.21E−07 |
| Gm14:1825310 | C/T | 32:0, 0:20 | 1.000, 0.000 | 28 | 1.21E−07 |
| Gm14:1888310 | G/A | 32:0, 0:20 | 1.000, 0.000 | 28 | 1.21E−07 |
| Gm14:1889307 | A/T | 32:0, 0:20 | 1.000, 0.000 | 28 | 1.21E−07 |
| Gm14:1957202 | A/G | 32:0, 0:20 | 1.000, 0.000 | 28 | 1.21E−07 |
| Gm14:1981029 | A/C | 32:0, 0:20 | 1.000, 0.000 | 28 | 1.21E−07 |
| Gm14:1981073 | A/T | 32:0, 0:20 | 1.000, 0.000 | 28 | 1.21E−07 |
| Gm14:1981255 | T/C | 32:0, 0:20 | 1.000, 0.000 | 28 | 1.21E−07 |
| Gm14:1992432 | C/G | 32:0, 0:20 | 1.000, 0.000 | 28 | 1.21E−07 |
| Gm14:2010834 | C/T | 32:0, 0:20 | 1.000, 0.000 | 28 | 1.21E−07 |
| Gm14:1759440 | C/T | 32:0, 0:20 | 1.000, 0.000 | 26 | 3.41E−07 |
| Gm14:1775298 | A/T | 32:0, 0:20 | 1.000, 0.000 | 26 | 3.41E−07 |
| Gm14:1775605 | C/T | 32:0, 0:20 | 1.000, 0.000 | 26 | 3.41E−07 |
| Gm14:1804116 | C/T | 32:0, 0:20 | 1.000, 0.000 | 26 | 3.41E−07 |
| Gm14:1804868 | T/C | 32:0, 0:20 | 1.000, 0.000 | 26 | 3.41E−07 |
| Gm14:1806330 | C/T | 32:0, 0:20 | 1.000, 0.000 | 26 | 3.41E−07 |
| Gm14:1806377 | T/C | 32:0, 0:20 | 1.000, 0.000 | 26 | 3.41E−07 |
| Gm14:1889158 | T/C | 32:0, 0:20 | 1.000, 0.000 | 26 | 3.41E−07 |
| Gm14:1899428 | T/A | 32:0, 0:20 | 1.000, 0.000 | 26 | 3.41E−07 |
| Gm14:1926218 | T/A | 32:0, 0:20 | 1.000, 0.000 | 26 | 3.41E−07 |
| Gm14:1928522 | C/T | 32:0, 0:20 | 1.000, 0.000 | 26 | 3.41E−07 |
| Gm14:1957206 | T/C | 32:0, 0:20 | 1.000, 0.000 | 26 | 3.41E−07 |
| Gm14:1959033 | A/T | 32:0, 0:20 | 1.000, 0.000 | 26 | 3.41E−07 |
| Gm14:1969518 | C/T | 32:0, 0:20 | 1.000, 0.000 | 26 | 3.41E−07 |
| Gm14:1975722 | A/G | 32:0, 0:20 | 1.000, 0.000 | 26 | 3.41E−07 |
| Gm14:1981293 | C/T | 32:0, 0:20 | 1.000, 0.000 | 26 | 3.41E−07 |
| Gm14:1983189 | T/A | 32:0, 0:20 | 1.000, 0.000 | 26 | 3.41E−07 |
| Gm14:2013786 | T/C | 32:0, 0:20 | 1.000, 0.000 | 26 | 3.41E−07 |
| Gm14:2014487 | G/A | 32:0, 0:20 | 1.000, 0.000 | 26 | 3.41E−07 |
| Gm14:2191538 | A/C | 32:0, 0:20 | 1.000, 0.000 | 26 | 3.41E−07 |
| Gm14:2191541 | C/T | 32:0, 0:20 | 1.000, 0.000 | 26 | 3.41E−07 |
| Gm14:2191563 | T/C | 32:0, 0:20 | 1.000, 0.000 | 26 | 3.41E−07 |
| Gm14:1711534 | C/A | 32:0, 0:20 | 1.000, 0.000 | 24 | 9.63E−07 |
| Gm14:1773993 | C/A | 32:0, 0:20 | 1.000, 0.000 | 24 | 9.63E−07 |
| Gm14:1808347 | G/A | 32:0, 0:20 | 1.000, 0.000 | 24 | 9.63E−07 |
| Gm14:1808348 | C/A | 32:0, 0:20 | 1.000, 0.000 | 24 | 9.63E−07 |
| Gm14:1812356 | T/A | 32:0, 0:20 | 1.000, 0.000 | 24 | 9.63E−07 |
| Gm14:1812358 | C/A | 32:0, 0:20 | 1.000, 0.000 | 24 | 9.63E−07 |
| Gm14:1874583 | G/T | 32:0, 0:20 | 1.000, 0.000 | 24 | 9.63E−07 |
| Gm14:1971096 | C/T | 32:0, 0:20 | 1.000, 0.000 | 24 | 9.63E−07 |
| Gm14:1975723 | G/A | 32:0, 0:20 | 1.000, 0.000 | 24 | 9.63E−07 |
| Gm14:1976101 | G/C | 32:0, 0:20 | 1.000, 0.000 | 24 | 9.63E−07 |
| Gm14:1998648 | T/A | 32:0, 0:20 | 1.000, 0.000 | 24 | 9.63E−07 |
| Gm14:2006929 | T/G | 32:0, 0:20 | 1.000, 0.000 | 24 | 9.63E−07 |
| Gm14:2013850 | T/A | 32:0, 0:20 | 1.000, 0.000 | 24 | 9.63E−07 |
| Gm14:2014479 | T/A | 32:0, 0:20 | 1.000, 0.000 | 24 | 9.63E−07 |
| Gm14:2014481 | T/A | 32:0, 0:20 | 1.000, 0.000 | 24 | 9.63E−07 |
| Gm14:2101794 | A/T | 32:0, 0:20 | 1.000, 0.000 | 24 | 9.63E−07 |
| Gm14:766045 | A/T | 32:0, 0:20 | 1.000, 0.000 | 22 | 2.73E−06 |
| Gm14:1801323 | T/A | 32:0, 0:20 | 1.000, 0.000 | 22 | 2.73E−06 |
| Gm14:1805026 | A/T | 32:0, 0:20 | 1.000, 0.000 | 22 | 2.73E−06 |
| Gm14:1879302 | G/A | 32:0, 0:20 | 1.000, 0.000 | 22 | 2.73E−06 |
| Gm14:1975774 | T/C | 32:0, 0:20 | 1.000, 0.000 | 22 | 2.73E−06 |
| Gm14:2014429 | G/A | 32:0, 0:20 | 1.000, 0.000 | 20 | 7.74E−06 |
| Gm14:2191662 | G/A | 32:0, 0:20 | 1.000, 0.000 | 20 | 7.74E−06 |
| Gm14:584976 | C/T | 32:0, 0:20 | 1.000, 0.000 | 18 | 2.21E−05 |
| Gm14:2007005 | C/A | 32:0, 0:20 | 1.000, 0.000 | 18 | 2.21E−05 |
| Gm14:1650177 | A/C | 32:0, 0:20 | 1.000, 0.000 | 16 | 6.33E−05 |
| Gm14:1899046 | A/G | 32:0, 0:20 | 1.000, 0.000 | 16 | 6.33E−05 |
| Gm14:806705 | C/T | 32:0, 0:20 | 1.000, 0.000 | 14 | 2.00E−04 |
| Gm14:1976057 | G/A | 32:0, 0:20 | 1.000, 0.000 | 14 | 2.00E−04 |
| Gm14:1889837 | A/T | 32:0, 0:20 | 1.000, 0.000 | 12 | 5.00E−04 |

[0171] A set of perfectly associated SNPs are predicted to have a non-synonymous variation or premature stop within a predicted encoded amino acid sequence of the gene models as shown in Table 3. These predicted mutations are candidate putative causative variants underlying stem canker trait variation. These overlap with gene models predicted to have a functional effect. Table 3 summarizes SNPs predicted to generate non-synonymous amino acid changes or stop codon within the predicted protein-coding region of the indicated gene model. A marker for the locus S08231-3 targets the polymorphism at Gm14:1727084 in gene model Glyma14g02740.1 is shown in bold in Table 3.

TABLE 3

| | | | Chi | Allele |
|---|---|---|---|---|
| SNP | Gene Model | Change | Value | (R/S) |
| Gm14:1727084 | Glyma14g02740.1 | Exonic; Non-Syn | 48 | C/G |
| Gm14:1731518 | | Exonic; Non-Syn | 46 | T/G |
| Gm14:1731690 | | Exonic; Non-Syn | 48 | C/T |
| Gm14:1731767 | | Exonic; Non-Syn | 42 | T/C |
| Gm14:1739468 | Glyma14g02750.1 | Exonic; Non-Syn | 46 | C/T |
| Gm14:1743592 | | Exonic; Non-Syn | 42 | G/A |
| Gm14:1744286 | | Exonic; Non-Syn | 32 | A/G |
| Gm14:1767525 | Glyma14g02780.1 | Exonic; Non-Syn | 32 | C/T |
| Gm14:1777105 | | Exonic; Non-Syn | 34 | T/A |
| Gm14:1784221 | Glyma14g02800.1 | Exonic; Non-Syn | 44 | T/A |
| Gm14:1792218 | Glyma14g02820.1 | Exonic; Non-Syn | 42 | C/T |
| Gm14:1851947 | Glyma14g02920.1 | Stop | 42 | G/A |
| Gm14:1911679 | Glyma14g03010.1 | Exonic; Non-Syn | 50 | A/T |
| Gm14:1914305 | Glyma14g03030.1 | Exonic; Non-Syn | 52 | C/T |
| Gm14:1935369 | Glyma14g03050.1 | Exonic; Non-Syn | 40 | C/T |
| Gm14:1936433 | Glyma14g03060.1 | Exonic; Non-Syn | 46 | T/C |
| Gm14:1981029 | Glyma14g03100.1 | Exonic; Non-Syn | 28 | A/C |
| Gm14:1981936 | | Exonic; Non-Syn | 34 | C/A |
| Gm14:1706973 | Glyma14g02710.4 | Exonic; Non-Syn | 44 | T/C |
| Gm14:1723656 | Glyma14g02730.1 | Exonic; Non-Syn | 52 | C/T |
| Gm14:1724087 | | Exonic; Non-Syn | 50 | A/G |
| Gm14:1724319 | | Exonic; Non-Syn | 52 | G/A |
| Gm14:1724793 | | Exonic; Non-Syn | 44 | T/A |

### Example 3

### Mapping Population Study

[0172] An F2 population of 180 progeny from a cross of a Brazilian soybean line and Pioneer proprietary soybean line EMGOPA313×98R31, segregating for response to southern stem canker, was used for stem canker marker validation and refinement. Parental line 98R31 scores high for stem canker resistance (score=9), while EMGOPA313 is susceptible (score=1) to the pathogen. The population was screened for QTLs for stem canker on LG-B2 or LG-D1b. A total of 15 markers polymorphic between the parental lines on LG-B2 and LG-D1b were utilized to construct the linkage map and perform QTL analysis. One major QTL for stem canker resistance was identified on LG-B2. The QTL spanned interval of marker S04492-1-A (10.27 cM, Gm14:1197243) and marker 500802-1-A (17.87 cM, Gm14:3468738) which includes 501591-1-A (11.17 cM, Gm14:1923247) and was closely linked with marker S04492-1-A (10.27 cM, Gm14:1197243), which explained about 48% of the phenotypic variation.

[0173] Phenotypic data for this mapping population was collected from plants and the phenotypic data were scored on a scale of 1 (susceptible), 3, 6, and 9 (resistant).

[0174] Markers polymorphic between the two parents (EMGOPA313 and 98R31) in the regions of interest (top of LG-B2, middle of LG-D1b) were identified manually based on a proprietary composite genetic map. A total of 17 polymorphic markers were identified to assay the entire population. One marker was removed due to monomorphism. The allele source was assigned maternal=A, paternal=B, and heterozygous=H. Chi-square analysis revealed one marker exhibited severe segregation distortion, and was removed from any subsequent mapping analyses.

[0175] Map Manager QTX.b20 (Manly et al. (2001) Mammalian Genome 12:930-932) was used to construct the linkage map, consisting of 15 markers, and perform the QTL analysis. A 1000 permutation test was used to establish the threshold for statistical significance (LOD ratio statistic—LRS) to declare putative QTL. The mean score was used for QTL mapping. Initial Map Manager Parameters were set to:

[0176] 1) Linkage Evaluation: Intercross

[0177] 2) Search Criteria: P=1e-5

[0178] 3) Map Function: Kosambi

[0179] 4) Cross Type: Line Cross

[0180] Progeny stem canker score distribution was skewed toward the higher scores, but there were sufficient numbers of progeny in each class for analysis. When progeny with scores of 1 and 3 were classified as susceptible, and those with scores of 6 and 9 as resistant, then the p value of chi-square test for the ratio 3:1 was 0.23 (<0.05), which implied that one dominant gene might control the resistance to the disease.

[0181] The 15 segregation markers were mapped to the two linkage groups, with 6 markers mapping to LG B2, and 9 markers mapping to LG D1b. The 1000 permutation test set the significance thresholds for stem canker at 10.4 for a p-value of 0.01 (significant), and at 17.6 for a p-value of 0.05 (highly significant).

[0182] The marker regression analysis showed that the QTL associated with stem canker resistance could be located on LG-B2. Marker regression data for LG B2 is summarized in Table 4 below.

TABLE 4

| Locus | Genetic (cM) | Physical (bp) | LRS | % PhenoVar | p-value |
|---|---|---|---|---|---|
| S01591-1 | 11.17 | 1923247 | 69.3 | 48 | 0.00000 |
| S04492-1 | 10.27 | 1197243 | 119.0 | 48 | 0.00000 |
| S00802-1 | 17.87 | 3468738 | 71.0 | 33 | 0.00000 |
| S01799-1 | 19.06 | 3727753 | 75.0 | 34 | 0.00000 |
| S03923-1 | 24.86 | 4946161 | 53.3 | 26 | 0.00000 |

[0183] This region was investigated further by interval mapping method in Map Manager

[0184] QTX.b20 using Kosambi map function with no control for other QTLs. The QTL spanned an interval comprising marker S04492-1-A through marker S00802-1-A and was closely linked with marker S04492-1-A which explained about 48% of the phenotypic variation observed.

### Example 4

### Mapping Population Study

[0185] An F2 population of 180 progeny from a cross of a Brazilian soybean line and Pioneer proprietary soybean line IGUACU×98R31, segregating for response to southern stem canker, was used for stem canker marker validation and refinement. Parental line 98R31 scores high for stem canker resistance (score=9), while IGUACU is susceptible to the pathogen (score=1). The population was screened for QTLs for stem canker on LG-B2 or LG-D1b. A total of 13 markers polymorphic between the parental lines on LG-B2 and LG-D1b were utilized to construct the linkage map and perform QTL analysis. One major QTL for stem canker resistance was identified on LG-B2. The QTL spanned interval of marker 504492-1-A (10.27 cM, Gm14:1197243) and marker 504785-1-A (26.08 cM, Gm14:5096522) and closely linked with marker S01799-1-A (19.06 cM, Gm14:3727753), which explained about 38% of the phenotypic variation.

[0186] Phenotypic data for this mapping population was collected from plants which were scored on a scale of 1 (susceptible), 3, 6, and 9 (resistant).

[0187] Markers polymorphic between the two parents (IGUACU and 98R31) in the regions of interest (top of LG-B2, middle of LG-D1b) were identified manually based on a proprietary composite genetic map. A total of 17 polymorphic markers were identified to assay the entire population. One marker was removed due to monomorphism. The allele source was assigned maternal=A, paternal=B, and heterozygous=H. Chi-square analysis revealed three markers exhibited severe segregation distortion, and these were removed from any subsequent mapping analyses.

[0188] Map Manager QTX.b20 (Manly et al. (2001) Mammalian Genome 12:930-932) was used to construct the linkage map, consisting of 13 markers, and perform the QTL analysis. A 1000 permutation test was used to establish the threshold for statistical significance (LOD ratio statistic—LRS) to declare putative QTL. The mean score was used for QTL mapping. Initial Map Manager Parameters were set to:

[0189] 1) Linkage Evaluation: Intercross

[0190] 2) Search Criteria: P=1e-5

[0191] 3) Map Function: Kosambi

[0192] 4) Cross Type: Line Cross

[0193] Progeny stem canker score distribution was somewhat skewed toward the higher score of 6, but there were sufficient numbers of progeny in each class for analysis. When progeny with scores of 1 and 3 were classified as susceptible, and those with scores of 6 and 9 as resistant, then the p value of chi-square test for the ratio 3:1 was 0.28 (<0.05), which implied that one dominant gene might control the resistance to the disease.

[0194] The 13 segregation markers were mapped to four linkage groups, 2 each corresponding to LG B2 and to LG D1b. Two sets of 3 markers markers mapped to LG B2, and a set of 5 markers plus a set of 2 markers mapped to LG D1b. The 1000 permutation test set the significance thresholds for stem canker at 16.5 for a p-value of 0.01 (significant), and at 43.9 for a p-value of 0.05 (highly significant).

[0195] The marker regression analysis showed that the QTL associated with stem canker resistance could be located on LG-B2 and LG D1b at p-0.001. Marker regression data for LG B2 is summarized in Table 5 below.

TABLE 5

| Locus | Genetic (cM) | Physical (bp) | LRS | % PhenoVar | p-value |
|---|---|---|---|---|---|
| S04785-1 | 26.08 | 5096522 | 59.1 | 29 | 0.00000 |
| S01799-1 | 19.06 | 3727753 | 51.0 | 25 | 0.00000 |
| S04492-1 | 10.27 | 1197243 | 62.4 | 30 | 0.00000 |

This region was investigated further by interval mapping method in Map Manager QTX.b20 using Kosambi map function with no control for other QTLs. A highly significant (LRS=83) QTL spanned an interval comprising marker S04785-1-A through marker S04492-1-A and was closely linked with marker S01799-1-A which explained about 38% of the phenotypic variation observed.

### Example 5

### Mapping Population Study

[0196] An F2 population of 180 progeny from a cross of a Brazilian soybean line and Pioneer proprietary soybean line IGUACU×98Y11, segregating for response to southern stem canker, was used for stem canker marker validation and refinement. Parental line 98Y11 scores high for stem canker resistance (score=9), while IGUACU is susceptible to the pathogen (score=1). The population was screened for QTLs for stem canker on LG-B2 or LG-D1b. A total of 10 markers polymorphic between the parental lines on LG-B2 and LG-D1b were utilized to construct the linkage map and perform QTL analysis. One major QTL for stem canker resistance was identified on LG-B2. The QTL spanned interval of marker S01591-1-A (11.17 cM, Gm14:1923247) and marker S01718-1-A (15 cM, Gm14:2747160) and closely linked with marker S01591-1-A (11.17 cM, Gm14:1923247), which explained about 36% of the phenotypic variation.

[0197] Phenotypic data for this mapping population was collected from plants which were scored on a scale of 1 (susceptible), 3, 6, and 9 (resistant).

[0198] Markers polymorphic between the two parents (IGUACU and 98Y11) in the regions of interest (top of LG-B2, middle of LG-D1b) were identified manually based on a proprietary composite genetic map. A total of 17 polymorphic markers were identified to assay the entire population. Six markers were removed due to monomorphism. The allele source was assigned maternal=A, paternal=B, and heterozygous=H. Chi-square analysis revealed one marker exhibited severe segregation distortion, and this was removed from any subsequent mapping analyses.

[0199] Map Manager QTX.b20 (Manly et al. (2001) Mammalian Genome 12:930-932) was used to construct the linkage map, consisting of 13 markers, and perform the QTL analysis. A 1000 permutation test was used to establish the threshold for statistical significance (LOD ratio statistic—LRS) to declare putative QTL. The mean score was used for QTL mapping. Initial Map Manager Parameters were set to:

[0200] 1) Linkage Evaluation: Intercross

[0201] 2) Search Criteria: P=1e-5

[0202] 3) Map Function: Kosambi

[0203] 4) Cross Type: Line Cross

[0204] Progeny stem canker score distribution was somewhat skewed toward the higher scores, but there were sufficient numbers of progeny in each class for analysis. When progeny with scores of 1 and 3 were classified as susceptible, and those with scores of 6 and 9 as resistant, then the p value of chi-square test for the ratio 3:1 was 0.18 (<0.05), which implied that one dominant gene might control the resistance to the disease.

[0205] The 10 segregation markers were mapped to three linkage groups, one corresponding to LG B2 and 2 corresponding to LG D1b. Four markers mapped to LG B2, and a set of 2 markers plus a set of 4 markers mapped to LG D1b. The 1000 permutation test set the significance thresholds for stem canker at 9.3 for a p-value of 0.01 (significant), and at 17.7 for a p-value of 0.05 (highly significant).

[0206] The marker regression analysis showed that the QTL associated with stem canker resistance could be located on LG-B2. Marker regression data for LG B2 is summarized in Table 6 below.

TABLE 6

| Locus | Genetic (cM) | Physical (bp) | LRS | % PhenoVar | p-value |
|---|---|---|---|---|---|
| S01591-1 | 11.17 | 1923247 | 80.5 | 36 | 0.00000 |
| S02987-1 | 11.74 | 2129691 | 75.8 | 35 | 0.00000 |
| S01718-1 | 15.00 | 2747150 | 63.3 | 30 | 0.00000 |
| S04785-1 | 26.08 | 5096522 | 39.7 | 20 | 0.00000 |

This region was investigated further by interval mapping method in Map Manager QTX.b20 using Kosambi map function with no control for other QTLs. A highly significant (LRS=80) QTL spanned an interval comprising marker S01591-1-A through marker S01718-1-A and was closely linked with marker S01591-1-A which explained about 36% of the phenotypic variation observed.

### Example 6

### Mapping Population Study

[0207] An F2 population of 184 progeny from a cross of a two Pioneer proprietary soybean lines 95M60×PHI_Res, segregating for response to southern stem canker, was used for stem canker marker validation and refinement. Parental line PHI_Res scores high for stem canker resistance (score=9), while 95M60 is susceptible to the pathogen (score=1). The population was screened for QTLs for stem canker on LG-B2 or LG-D1b. A total of 21 markers polymorphic between the parental lines on LG-B2 and LG-D1b were utilized to construct the linkage map and perform QTL analysis. One major QTL for stem canker resistance was identified on LG-B2 for all three phenotypic data sets. The QTL was closely linked with marker S03188-1-A (10.17 cM, Gm14:1088724), which explained about 24%, 12%, and 31% of the phenotypic variation observed in the external screen, internal screen, and overall phenotypic data sets respectively.

[0208] Phenotypic data for this mapping population were measured by external and internal screens with plants scored as resistant (R), susceptible (S), and heterogeneous (H). These scores were converted to a numerical scale for mapping analysis, with R=9, H=5, and S=1.

[0209] Markers polymorphic between the two parents (95M60 and PHI_Res) in the regions of interest (top of LG-B2, middle of LG-D1b) were identified using proprietary software. A total of 22 polymorphic markers were identified to assay the entire population. One marker was removed due to monomorphism. The allele source was assigned codes maternal=A, paternal=B, and heterozygous=H.

[0210] Map Manager QTX.b20 (Manly et al. (2001) Mammalian Genome 12:930-932) was used to construct the linkage map and perform the QTL analysis. A 1000 permutation test was used to establish the threshold for statistical significance (LOD ratio statistic—LRS) to declare putative QTL. The mean score was used for QTL mapping. Initial Map Manager Parameters were set to:

[0211] 1) Linkage Evaluation: Intercross

[0212] 2) Search Criteria: P=1e-5

[0213] 3) Map Function: Kosambi

[0214] 4) Cross Type: Line Cross

[0215] Progeny stem canker score distribution showing the number of individuals in each phenotypic class for each screen is summarized in Table 7 below.

TABLE 7

| Data Set | Susceptible | Heterozygous | Resistant |
|---|---|---|---|
| External | 54 | 6 | 121 |
| Internal | 97 | 10 | 74 |
| Overall | 53 | 0 | 73 |

[0216] The 21 segregation markers were mapped to three linkage groups, with 9 markers on LG B2 and 12 markers (two sets of 6) on LG D1b. The 1000 permutation test set the significance thresholds for stem canker at 8.1 for a p-value of 0.01 (significant), and at 15.6 for a p-value of 0.05 (highly significant) for the external screen, 7.7 for a p-value of 0.01 (significant) and 16.1 for a p-value of 0.05 (highly significant) for the external screen, and 8.4 for a p-value of 0.01 (significant) and 15.7 for a p-value of 0.05 (highly significant) for the overall screen.

[0217] The marker regression analysis showed that the QTL associated with stem canker resistance could be located on LG-B2 for all three phenotypic data sets at the p=0.001 level. Marker regression data for LG B2 using the External phenotypic dataset is summarized in Table 8 below.

TABLE 8

| Locus | Genetic (cM) | Physical (bp) | LRS | % PhenoVar | p-value |
|---|---|---|---|---|---|
| S03188-1 | 10.17 | 1088724 | 44.1 | 23 | 0.00000 |
| S01718-1 | 15.00 | 2747160 | 42.3 | 21 | 0.00000 |
| S00802-1 | 17.87 | 3468738 | 22.4 | 12 | 0.00000 |
| S00777-1 | 19.06 | 3726937 | 26.4 | 14 | 0.00000 |
| S00288-1 | 21.26 | 4204414 | 25.5 | 13 | 0.00000 |
| S00341-1 | 25.61 | 5028737 | 18.3 | 10 | 0.00002 |

[0218] Marker regression data for LG B2 using the Internal phenotypic dataset is summarized in Table 9 below.

TABLE 9

| Locus | Genetic (cM) | Physical (bp) | LRS | % PhenoVar | p-value |
|---|---|---|---|---|---|
| S03188-1 | 10.17 | 1088724 | 19.4 | 11 | 0.00001 |
| S01718-1 | 15.00 | 2747160 | 21.8 | 12 | 0.00000 |
| S00802-1 | 17.87 | 3468738 | 11.4 | 6 | 0.00074 |
| S00777-1 | 19.06 | 3726937 | 14.3 | 8 | 0.00015 |
| S00288-1 | 21.26 | 4204414 | 13.7 | 7 | 0.00022 |

[0219] Marker regression data for LG B2 using the Overall phenotypic dataset is summarized in Table 10 below.

TABLE 10

| Locus | Genetic (cM) | Physical (bp) | LRS | % PhenoVar | p-value |
|---|---|---|---|---|---|
| S03188-1 | 10.17 | 1088724 | 39.4 | 28 | 0.00000 |
| S01718-1 | 14.89 | 2747160 | 41.4 | 29 | 0.00000 |
| S00802-1 | 17.87 | 3468738 | 21.6 | 16 | 0.00000 |
| S00777-1 | 19.06 | 3726937 | 26.1 | 19 | 0.00000 |
| S00288-1 | 21.26 | 4204414 | 25.1 | 18 | 0.00000 |
| S00341-1 | 25.61 | 5028737 | 18.6 | 14 | 0.00002 |

[0220] This region was investigated further by interval mapping method in Map Manager QTX.b20 using Kosambi map function with no control for other QTLs. Using the External screen dataset, a highly significant (LRS=45.6) QTL spanned an interval comprising marker S03188-1-A through marker S01718-1-A and was closely linked with marker S03188-1-A which explained about 24% of the phenotypic variation observed. Using the Internal screen dataset, a highly significant (LRS=21.7) QTL spanned an interval comprising marker S03188-1-A through marker S01718-1-A and was closely linked with marker S03188-1-A which explained about 12% of the phenotypic variation observed. Using the Overall screen dataset, a highly significant (LRS=43.3) QTL spanned an interval comprising marker S03188-1-A through marker S01718-1-A and was closely linked with marker S03188-1-A which explained about 31% of the phenotypic variation observed.

[0221] This population was further evaluated with additional markers on LG B2. Genotype data was collected using new markers near the identified region on the top of LG B2. Six markers were monomorphic in this population, and were removed for subsequent analysis, the remaining 17 markers were used for analysis. Map Manager QTX.b20 was used to construct the linkage map and perform the QTL analysis as described above. A1000 permutation test was used to establish the threshold for statistical significance (LOD ratio statistic—LRS) to declare putative QTL.

[0222] The 17 markers all mapped as one group to LG B2. The permutation test established the following critical LRS statistic values for the three phenotypic datasets: External screen: LRS 6.5 for a p-value of 0.01 (significant), and at 17.3 for a p-value of 0.05 (highly significant)

[0223] Internal screen: LRS 6.6 for a p-value of 0.01 (significant) and 17.3 for a p-value of 0.05 (highly significant)

[0224] Overall: 6.8 for a p-value of 0.01 (significant) and 13.6 for a p-value of 0.05 (highly significant)

[0225] The marker regression analysis showed that the QTL associated with stem canker resistance could be located on LG-B2 for all three phenotypic data sets. Marker regression data for LG B2 using the External phenotypic dataset is summarized in Table 11 below.

TABLE 11

| Locus | Genetic (cM) | Physical (bp) | LRS | % PhenoVar | p-value |
|---|---|---|---|---|---|
| S08257-1 | 10.74 | 1650065 | 46.6 | 25 | 0.00000 |
| S03188-1 | 10.17 | 1088724 | 43.8 | 23 | 0.00000 |
| S08256-1 | 10.68 | 1594889 | 41.3 | 21 | 0.00000 |
| S08231-3 | 10.83 | 1727084 | 38.1 | 19 | 0.00000 |
| S08231-4 | 10.83 | 1727625 | 33.9 | 17 | 0.00000 |
| S13722-1 | 11.18 | 1925222 | 39.4 | 20 | 0.00000 |
| S13721-2 | 10.89 | 1788456 | 36.2 | 18 | 0.00000 |
| S08255-3 | 10.86 | 1755250 | 36.9 | 18 | 0.00000 |
| S08255-4 | 10.86 | 1755572 | 41.6 | 21 | 0.00000 |
| S01718-1 | 15.00 | 2747160 | 42.5 | 21 | 0.00000 |
| S00802-1 | 17.87 | 3468738 | 22.6 | 12 | 0.00000 |
| S00777-1 | 19.06 | 3726937 | 26.3 | 14 | 0.00000 |
| S00288-1 | 21.26 | 4204414 | 25.2 | 13 | 0.00000 |
| S00341-1 | 25.61 | 5028737 | 18.1 | 10 | 0.00002 |

[0226] Marker regression data for LG B2 using the Internal phenotypic dataset is summarized in Table 12 below.

TABLE 12

| Locus | Genetic (cM) | Physical (bp) | LRS | % PhenoVar | p-value |
|---|---|---|---|---|---|
| S08257-1 | 10.74 | 1650065 | 20.8 | 12 | 0.00001 |
| S03188-1 | 10.17 | 1088724 | 19.7 | 11 | 0.00001 |
| S08256-1 | 10.68 | 1594889 | 19.1 | 10 | 0.00001 |
| S08231-3 | 10.83 | 1727084 | 15.8 | 8 | 0.00007 |
| S13722-1 | 11.18 | 1925222 | 16.4 | 9 | 0.00005 |
| S08255-3 | 10.86 | 1755250 | 18.3 | 10 | 0.00002 |
| S08255-4 | 10.86 | 1755572 | 20.0 | 10 | 0.00001 |

[0227] Marker regression data for LG B2 using the Overall phenotypic dataset is summarized Table 13 below.

TABLE 13

| Locus | Genetic (cM) | Physical (bp) | LRS | % PhenoVar | p-value |
|---|---|---|---|---|---|
| S08257-1 | 10.74 | 1650065 | 42.3 | 31 | 0.00000 |
| S03188-1 | 10.17 | 1088724 | 39.4 | 28 | 0.00000 |
| S08256-1 | 10.68 | 1594889 | 37.8 | 26 | 0.00000 |
| S08231-3 | 10.83 | 1727084 | 33.7 | 24 | 0.00000 |
| S08231-4 | 10.83 | 1727625 | 28.6 | 20 | 0.00000 |
| S13722-1 | 11.18 | 1925222 | 34.4 | 24 | 0.00000 |
| S13721-2 | 10.89 | 1788456 | 30.9 | 22 | 0.00000 |
| S08255-3 | 10.86 | 1755250 | 34.4 | 24 | 0.00000 |
| S08255-4 | 10.86 | 1755572 | 38.6 | 26 | 0.00000 |
| S01718-1 | 15.00 | 2747160 | 42.2 | 28 | 0.00000 |
| S00802-1 | 17.87 | 3468738 | 22.1 | 16 | 0.00000 |
| S00777-1 | 19.06 | 3726937 | 26.3 | 19 | 0.00000 |
| S00288-1 | 21.26 | 4204414 | 25.1 | 18 | 0.00000 |

[0228] This region was investigated further by interval mapping method in Map Manager QTX.b20 using Kosambi map function with no control for other QTLs. Using the External screen dataset, a highly significant (LRS=46.6) QTL spanned an interval comprising marker S08257-1-A through marker S03188-1-A and was closely linked with marker S08257-1-A which explained about 25% of the phenotypic variation observed. Using the Internal screen dataset, a highly significant (LRS=21.8) QTL spanned an interval comprising marker S08257-1-A through marker S03188-1-A and was closely linked with marker S08257-1-A which explained about 12% of the phenotypic variation observed. Using the Overall screen dataset, a highly significant (LRS=42.3) QTL spanned an interval comprising marker S08257-1-A through marker S03188-1-A and was closely linked with marker S08257-1-A which explained about 31% of the phenotypic variation observed.

### Example 7

### Marker Development

[0229] Markers were developed to characterize, identify, and/or select resistant or susceptible alleles for stem canker on linkage group B2 (ch 14). Markers were screened and validated against various known resistant and susceptible parents.

[0230] Markers to loci S08241-1 (10.85 cM, Gm14:1747540), S08251-2 (10.85 cM, Gm14:1748141), and S08251-4 (10.85 cM, Gm14:1748042) were developed to identify alleles associated with the stem canker resistance phenotype. Consensus sequence from a panel of lines was used for development for markers to identify potential marker loci and to provide information on alleles in the targeted genomic region on LG B2 (ch14). During development, markers were validated and confirmed against a panel of about 30 resistant and susceptible varieties which included proprietary experimental lines, proprietary commercial lines, and public lines. Potential markers were tested against genomic DNA extracted via different methods, such as citrate or urea extraction, as well from different tissues, such as leaf or seed tissue. Further development and testing was done to optimize the marker system for high throughput analysis of soybean using a standard amplification procedure provided in Example 8. From this testing, S08241-1-Q6, S08251-2-Q10, and S08251-4-Q7 were chosen for high throughput analysis needs, but other versions can be used to detect the polymorphism.

### Example 8

### Marker Assay

[0231] Any source tissue, nucleic acid isolation, and analysis method or combination thereof may be used to isolate, detect and/or characterize polynucleotides associated with stem canker tolerance. One or more of primers and/or probes may comprise a heterologous detectable label. Exemplary options are provided below.

[0232] Samples for DNA preparation are taken by leaf punch and DNA isolated by citrate extraction. Sample replicates of each variety may be used in the analysis. Samples are set up in a 96 well plate, which is replicated 4 times into a 384 plate and dried down.

[0233] For the TAQMAN® assay, each reaction mix is as follows:

| | |
|---|---|
| Water | 3.625 μl |
| Hottub Buffer | 0.5 μl |
| dNTP (2.5 mM each) | 0.15 μl |
| Primer1 + Primer2 (10 μM each) | 0.0375 μl |
| Primer3 + Primer3 (10 μM each) | 0.0375 μl |
| Probe 1 (10 μM) | 0.05 μl |
| Probe 2 (10 μM) | 0.05 μl |
| Hottub Enzyme | 0.025 μl |
| Invitrogen ROX ™ dye (50X) | 0.075 μl |
| DNA | 0.05 μl |

[0234] DNA is amplified by PCR in a hydrocycler using the following conditions:

| | |
|---|---|
| 94° C. | 10 min 1 cycle, followed by 40 cycles of: |
| 94° C. | 30 sec |
| 60° C. | 60 sec |

[0235] An alternative reaction mix which can be amplified using the temperature and cycle conditions provided above is as follows:

DNA (dried down)

| | |
|---|---|
| Water | 2.42 μl |
| KlearKall Mastermix | 2.5 μl |
| Forward Primer (100 μm) | 0.0375 μl |
| Reverse Primer (100 μm) | 0.0375 μl |
| Probe 1 (100 μm) | 0.005 μl |
| Probe 2 (100 μm) | 0.005 μl |
| Total | 5 μl |

[0236] The markers provided and exemplified herein could be useful, for example, for detecting and/or selecting soybean plants with improved tolerance to stem canker. The physical position of each locus and each SNP has been provided. Any marker capable of detecting a polymorphism at one of these physical positions, or a marker closely linked thereto, could also be useful, for example, for detecting and/or selecting soybean plants with improved stem canker tolerance. In some examples, the SNP allele present in the tolerant parental line could be used as a favorable allele to detect or select plants with improved tolerance. In other examples, the SNP allele present in the susceptible parent line could be used as an unfavorable allele to detect or select plants without improved tolerance.

What is claimed is:

1. A method of identifying a first soybean plant or germplasm having improved tolerance to stem canker, said method comprising detecting in the first soybean plant or germplasm at least one allele of a quantitative trait locus that is associated with stem canker resistance, wherein said quantitative trait locus is localized to a chromosomal interval flanked by and including markers BARC-013365-00489 and BARCSOYSSR_14_0281 on linkage group B2 (ch 14).

2. The method of claim 1, wherein the chromosomal interval is flanked by and includes markers BARC-013365-00489 and S04785-1 on linkage group B2 (ch 14).

3. The method of claim 1, wherein the chromosomal interval is flanked by and includes markers BARCSOYSSR_14_0036 and BARCSOYSSR_14_0281 on linkage group B2 (ch 14).

4. The method of claim 1, wherein the chromosomal interval is flanked by and includes markers S03188-1 and S04785-1 on linkage group B2 (ch 14).

5. The method of claim 1, wherein the chromosomal interval is flanked by and includes markers S03188-1 and S02987-1 on linkage group B2 (ch 14).

6. The method of claim 1, wherein the chromosomal interval is flanked by and includes markers Gm14:584976 and Gm14:2359579 on linkage group B2 (ch 14).

7. The method of claim 1, wherein the chromosomal interval is flanked by and includes markers Gm14:1697331 and Gm14:2019929 on linkage group B2 (ch 14).

8. The method of claim 1, wherein the chromosomal interval is flanked by and includes markers Gm14:1706695 and Gm14:1942681 on linkage group B2 (ch 14).

9. The method of claim 1, wherein detecting comprises detecting an allele of one or more marker locus selected from the group consisting of:
(a) a marker that detects a polymorphism at S03188-1, S04492-1, S08256-1, S08257-1, S08231-3, S08231-4, S08241-1, S08251-4, S08251-2, S08255-3, S08255-4, S13721-2, S01591-1, S13722-1, S02987-1, S00802-1, S00777-1, S01799-1, S00288-1, S03923-1, S00341-1, S01718-1, and S04785-1 on LG B2 (ch 14);
(b) a marker locus comprising S03188-1, S04492-1, S08256-1, S08257-1, S08231-3, S08231-4, S08241-1, S08251-4, S08251-2, S08255-3, S08255-4, S13721-2, S01591-1, S13722-1, S02987-1, S00802-1, S00777-1, S01799-1, S00288-1, S03923-1, S00341-1, S01718-1, and S04785-1 on LG B2 (ch 14);
(c) S03188-1-A, S04492-1-A, S08256-1-01, S08257-1-01, S08231-3-01, S08231-4-01, S08241-1-06, S08251-4-07, S08251-2-010, S08255-3-03, S08255-4-Q1, S13721-2-01, S01591-1-A, S13722-1-01, S02987-1-A, S00802-1-A, S00777-1-A, S01799-1-A, S00288-1-A, S03923-1-A, S00341-1-A, S01718-1-A, and S04785-1-A on LG B2 (ch 14);
(d) a marker locus comprising Gm14:1088724, Gm14:1197243, Gm14:1594889, Gm14:1650065, Gm14:1727084, Gm14:1727625, Gm14:1747540, Gm14:1748042, Gm14:1748141, Gm14:1755250, Gm14:1755572, Gm14:1788456, Gm14:1923247, Gm14:1925222, Gm14:2129691, Gm14:3468738, Gm14:3726937, Gm14:3727753, Gm14:4204414, Gm14:4946161, Gm14:5028737, Gm14:5096522, Gm14:1706695, Gm14:1723656, Gm14:1723831, Gm14:1724319, Gm14:1738483, Gm14:1739929, Gm14:1850843, Gm14:1853044, Gm14:1863371, Gm14:1863436, Gm14:1863868, Gm14:1914305, Gm14:1936105, Gm14:1939210, Gm14:1940046, Gm14:1942461, Gm14:1942681, Gm14:1700735, Gm14:1702258, Gm14:1715352, Gm14:1718565, Gm14:1722078, Gm14:1722192, Gm14:1723045, Gm14:1724087, Gm14:1724245, Gm14:1724558, Gm14:1724603, Gm14:1725318, Gm14:1726899, Gm14:1738054, Gm14:1784545, Gm14:1785276, Gm14:1793750, Gm14:1842226, Gm14:1850134, Gm14:1850654, Gm14:1850808, Gm14:1851180, Gm14:1851369, Gm14:1851467, Gm14:1851793, Gm14:1852388, Gm14:1852579, Gm14:1855401, Gm14:1867651, Gm14:1867913, Gm14:1867927, Gm14:1910547, Gm14:1910746, Gm14:1910787, Gm14:1911679, Gm14:1916729, Gm14:1916742, Gm14:1919121, Gm14:1934770, Gm14:1935561, Gm14:1935695, Gm14:1935949, Gm14:1936112, Gm14:1936619, Gm14:1936750, Gm14:1936804, Gm14:1936827, Gm14:1937070, Gm14:1937136, Gm14:1937495, Gm14:1938061, Gm14:1940079, Gm14:1940534, Gm14:1940728, Gm14:1940825, Gm14:1941047, Gm14:1941105, Gm14:1944642, Gm14:1700746, Gm14:1706616, Gm14:1706705, Gm14:1706782, Gm14:1708836, Gm14:1709816, Gm14:1712174, Gm14:1717270, Gm14:1722544, Gm14:1723756, Gm14:1725153, Gm14:1725269, Gm14:1726477, Gm14:1731690, Gm14:1738538, Gm14:1739491, Gm14:1739824, Gm14:1785457, Gm14:1787260, Gm14:1796497, Gm14:1840314, Gm14:1842837, Gm14:1850412, Gm14:1850433, Gm14:1850907, Gm14:1851535, Gm14:1852210, Gm14:1859255, Gm14:1860411, Gm14:1909564, Gm14:1910968, Gm14:1935936, Gm14:1936214, Gm14:1936876, Gm14:1939030, Gm14:1939031, Gm14:1939081, Gm14:1940392, Gm14:1941517, Gm14:1989692, Gm14:1989717, Gm14:1992951, Gm14:2003498, Gm14:2004242, Gm14:2004409, Gm14:2006356, Gm14:1698254, Gm14:1698262, Gm14:1698269, Gm14:1701170, Gm14:1701174, Gm14:1701472, Gm14:1701825, Gm14:1702477, Gm14:1702552, Gm14:1702622, Gm14:1704204, Gm14:1705803, Gm14:1706201, Gm14:1706361, Gm14:1706585, Gm14:1706915, Gm14:1708746, Gm14:1713290, Gm14:1718056, Gm14:1718944, Gm14:1719373, Gm14:1723066, Gm14:1726434, Gm14:1726867, Gm14:1727235, Gm14:1728343, Gm14:1730044, Gm14:1731518, Gm14:1736053, Gm14:1738509, Gm14:1738914, Gm14:1739468, Gm14:1739718, Gm14:1739772, Gm14:1749899, Gm14:1785516, Gm14:1785559, Gm14:1786034, Gm14:1786259, Gm14:1793453, Gm14:1796469, Gm14:1797188, Gm14:1798987, Gm14:1800055, Gm14:1842374, Gm14:1850066, Gm14:1850741, Gm14:1850928, Gm14:1852469, Gm14:1854015, Gm14:1854023, Gm14:1859810, Gm14:1860271, Gm14:1862541, Gm14:1867332, Gm14:1868414, Gm14:1919937, Gm14:1935444, Gm14:1936433, Gm14:1937170, Gm14:1937923, Gm14:1938818, Gm14:1939343, Gm14:1939364, Gm14:1939647, Gm14:1939662, Gm14:1939746, Gm14:1939749, Gm14:1940207, Gm14:1940573, Gm14:1941546, Gm14:1945962, Gm14:1946355, Gm14:1990996, Gm14:1991421, Gm14:2001506, Gm14:2001882, Gm14:2003462, Gm14:2003672, Gm14:1697331, Gm14:1698694, Gm14:1700508, Gm14:1701739, Gm14:1701858, Gm14:1702110, Gm14:1702378, Gm14:1706884, Gm14:1706973, Gm14:1708902, Gm14:1711952, Gm14:1712050, Gm14:1712345, Gm14:1717261, Gm14:1722228, Gm14:1722277, Gm14:1723101, Gm14:1724793, Gm14:1725740, Gm14:1726334, Gm14:1727170, Gm14:1730199, Gm14:1736329, Gm14:1736463, Gm14:1736832, Gm14:1737771, Gm14:1738824, Gm14:1738960, Gm14:1743818, Gm14:1756757, Gm14:1760506, Gm14:1778710, Gm14:1783716, Gm14:1784221, Gm14:1786098, Gm14:1797150, Gm14:1797155, Gm14:1799977, Gm14:1811618, Gm14:1812051, Gm14:1824464, Gm14:1839360, Gm14:1843408, Gm14:1850104, Gm14:1851115, Gm14:1851116, Gm14:1855960, Gm14:1858300, Gm14:1860243, Gm14:1860675, Gm14:1866981, Gm14:1869210, Gm14:1872625, Gm14:1902929, Gm14:1913544, Gm14:1914780, Gm14:1935408, Gm14:1936381, Gm14:1936425, Gm14:1939383, Gm14:1988977, Gm14:1989052, Gm14:1990632, Gm14:1990775, Gm14:1991550, Gm14:1999220, Gm14:2003981, Gm14:1697620, Gm14:1697978, Gm14:1699410, Gm14:1700636, Gm14:1701683, Gm14:1701935, Gm14:1702661, Gm14:1702755, Gm14:1704651, Gm14:1704664, Gm14:1712038, Gm14:1712320, Gm14:1712713, Gm14:1712865, Gm14:1712866, Gm14:1713999, Gm14:1719022, Gm14:1728216, Gm14:1731767, Gm14:1735093, Gm14:1735102, Gm14:1736945, Gm14:1743592, Gm14:1748064, Gm14:1749126, Gm14:1754686, Gm14:1757996, Gm14:1760483, Gm14:1783231, Gm14:1783538, Gm14:1783756, Gm14:1786013, Gm14:1787773, Gm14:1792218, Gm14:1799327, Gm14:1799390, Gm14:1799540, Gm14:1800012, Gm14:1800319, Gm14:1811113, Gm14:1811977, Gm14:1824284, Gm14:1837872, Gm14:1837888, Gm14:1851947, Gm14:1858277, Gm14:1861083, Gm14:1887021, Gm14:1903293, Gm14:1910033, Gm14:1919915, Gm14:1934737, Gm14:1946125, Gm14:1958086, Gm14:1986602, Gm14:1987892, Gm14:1988001, Gm14:1989951, Gm14:1991474, Gm14:1997517, Gm14:2006319, Gm14:2017162, Gm14:2019929, Gm14:1701692, Gm14:1702315, Gm14:1702956, Gm14:1703980, Gm14:1706523, Gm14:1711087, Gm14:1712377, Gm14:1714965, Gm14:1727031, Gm14:1727851, Gm14:1728741, Gm14:1729293, Gm14:1730480, Gm14:1730798, Gm14:1731840, Gm14:1732232, Gm14:1732358, Gm14:1732363, Gm14:1732403, Gm14:1735755, Gm14:1735945, Gm14:1743425, Gm14:1744356, Gm14:1746573, Gm14:1748959, Gm14:1750564, Gm14:1753875, Gm14:1754007, Gm14:1755671, Gm14:1756046, Gm14:1760299, Gm14:1760329, Gm14:1761362, Gm14:1766162, Gm14:1780165, Gm14:1780408, Gm14:1782983, Gm14:1789475, Gm14:1799494, Gm14:1799548, Gm14:1799571, Gm14:1811318, Gm14:1825691, Gm14:1834023, Gm14:1841281, Gm14:1846850, Gm14:1887108, Gm14:1887251, Gm14:1935369, Gm14:1969791, Gm14:1981574, Gm14:1981644, Gm14:1983907, Gm14:1986614, Gm14:1986675, Gm14:1987587, Gm14:1988422, Gm14:1988424, Gm14:1988520, Gm14:1988558, Gm14:1989403, Gm14:1991457, Gm14:1991910, Gm14:1992830, Gm14:1993931, Gm14:1997124, Gm14:1998879, Gm14:2004939, Gm14:2005896, Gm14:1698816, Gm14:1701991, Gm14:1710294, Gm14:1710303, Gm14:1711007, Gm14:1711575, Gm14:1713816, Gm14:1728293, Gm14:1729743, Gm14:1730281, Gm14:1730795, Gm14:1732205, Gm14:1744432, Gm14:1751350, Gm14:1755398, Gm14:1756188, Gm14:1761081, Gm14:1761387, Gm14:1762867, Gm14:1765302, Gm14:1777323, Gm14:1779323, Gm14:1780397, Gm14:1800359, Gm14:1803234, Gm14:1811158, Gm14:1825653, Gm14:1869500, Gm14:1876026, Gm14:1876675, Gm14:1876844, Gm14:1876847, Gm14:1879162, Gm14:1884603, Gm14:1904675, Gm14:1944708, Gm14:1954056, Gm14:1954062, Gm14:1967108, Gm14:1972107, Gm14:2006215, Gm14:2011465, Gm14:1704689, Gm14:1711569, Gm14:1713323, Gm14:1728052, Gm14:1729537, Gm14:1732261, Gm14:1732593, Gm14:1735227, Gm14:1744452, Gm14:1754156, Gm14:1755877, Gm14:1756355, Gm14:1759702, Gm14:1780316, Gm14:1801585, Gm14:1810099, Gm14:1810126, Gm14:1810421, Gm14:1823776, Gm14:1875278, Gm14:1875874, Gm14:1902961, Gm14:1910054, Gm14:1949216, Gm14:1957357, Gm14:1957358, Gm14:1960447, Gm14:1980728, Gm14:1984129, Gm14:1992331, Gm14:1993147, Gm14:1995593, Gm14:1995600, Gm14:1996952, Gm14:1997412, Gm14:2004591, Gm14:1645762, Gm14:1713775, Gm14:1716505, Gm14:1729186, Gm14:1729798, Gm14:1732529, Gm14:1753922, Gm14:1759619, Gm14:1759635, Gm14:1760144, Gm14:1761168, Gm14:1771612, Gm14:1777105, Gm14:1778517, Gm14:1779288, Gm14:1779568, Gm14:1804682, Gm14:1810135, Gm14:1825225, Gm14:1828925, Gm14:1846994, Gm14:1848374, Gm14:1874941, Gm14:1875261, Gm14:1875470, Gm14:1879189, Gm14:1881168, Gm14:1923548, Gm14:1923935, Gm14:1955048, Gm14:1955118, Gm14:1955144, Gm14:1959610, Gm14:1960454, Gm14:1967167, Gm14:1970908, Gm14:1976442, Gm14:1981936, Gm14:1982632, Gm14:1982756, Gm14:1984276, Gm14:1994907, Gm14:2013156, Gm14:2019411, Gm14:1711379, Gm14:1713140, Gm14:1727997, Gm14:1744286, Gm14:1757864, Gm14:1759363, Gm14:1765933, Gm14:1767525, Gm14:1767582, Gm14:1768845, Gm14:1775564, Gm14:1778106, Gm14:1778621, Gm14:1780281, Gm14:1780494, Gm14:1805372, Gm14:1809090, Gm14:1810313, Gm14:1812109, Gm14:1812114, Gm14:1824651, Gm14:1875656, Gm14:1877489, Gm14:1878068, Gm14:1903061, Gm14:1950278, Gm14:1950577, Gm14:1950969, Gm14:1970110, Gm14:1982411, Gm14:1983489, Gm14:1983507, Gm14:1983593, Gm14:1993730, Gm14:1993788, Gm14:1993806, Gm14:2006229, Gm14:2015853, Gm14:2359579, Gm14:1579650, Gm14:1764334, Gm14:1764392, Gm14:1764403, Gm14:1767878, Gm14:1805366, Gm14:1825173, Gm14:1879313, Gm14:1886238, Gm14:1899408, Gm14:1960137, Gm14:1971009, Gm14:1983348, Gm14:2011607, Gm14:2012105, Gm14:2340746, Gm14:1767671, Gm14:1771502, Gm14:1771578, Gm14:1803995, Gm14:1805322, Gm14:1809988, Gm14:1825310, Gm14:1888310, Gm14:1889307, Gm14:1957202, Gm14:1981029, Gm14:1981073, Gm14:1981255, Gm14:1992432, Gm14:2010834, Gm14:1759440, Gm14:1775298, Gm14:1775605, Gm14:1804116, Gm14:1804868, Gm14:1806330, Gm14:1806377, Gm14:1889158, Gm14:1899428, Gm14:1926218, Gm14:1928522, Gm14:1957206, Gm14:1959033, Gm14:1969518, Gm14:1975722, Gm14:1981293, Gm14:1983189, Gm14:2013786, Gm14:2014487, Gm14:2191538, Gm14:2191541, Gm14:2191563, Gm14:1711534, Gm14:1773993, Gm14:1808347, Gm14:1808348, Gm14:1812356, Gm14:1812358, Gm14:1874583, Gm14:1971096, Gm14:1975723, Gm14:1976101, Gm14:1998648, Gm14:2006929, Gm14:2013850, Gm14:2014479, Gm14:2014481, Gm14:2101794, Gm14:766045, Gm14:1801323, Gm14:1805026, Gm14:1879302, Gm14:1975774, Gm14:2014429, Gm14:2191662, Gm14:584976, Gm14:2007005, Gm14:1650177, Gm14:1899046, Gm14:806705, Gm14:1976057, Gm14:2747160, or Gm14:1889837;
(e) a marker that detects a polymorphism at Gm14:1088724, Gm14:1197243, Gm14:1594889, Gm14:1650065, Gm14:1727084, Gm14:1727625, Gm14:1747540, Gm14:1748042, Gm14:1748141, Gm14:1755250, Gm14:1755572, Gm14:1788456, Gm14:1923247, Gm14:1925222, Gm14:2129691, Gm14:3468738, Gm14:3726937, Gm14:3727753, Gm14:4204414, Gm14:4946161, Gm14:5028737, Gm14:5096522, Gm14:1706695, Gm14:1723656, Gm14:1723831, Gm14:1724319, Gm14:1738483, Gm14:1739929, Gm14:1850843, Gm14:1853044, Gm14:1863371, Gm14:1863436, Gm14:1863868, Gm14:1914305, Gm14:1936105, Gm14:1939210, Gm14:1940046, Gm14:1942461, Gm14:1942681, Gm14:1700735, Gm14:1702258, Gm14:1715352, Gm14:1718565, Gm14:1722078, Gm14:1722192, Gm14:1723045, Gm14:1724087, Gm14:1724245, Gm14:1724558, Gm14:1724603, Gm14:1725318, Gm14:1726899, Gm14:1738054, Gm14:1784545, Gm14:1785276, Gm14:1793750, Gm14:1842226, Gm14:1850134, Gm14:1850654, Gm14:1850808, Gm14:1851180, Gm14:1851369, Gm14:1851467, Gm14:1851793, Gm14:1852388, Gm14:1852579, Gm14:1855401, Gm14:1867651, Gm14:1867913, Gm14:1867927, Gm14:1910547, Gm14:1910746, Gm14:1910787, Gm14:1911679, Gm14:1916729, Gm14:1916742, Gm14:1919121, Gm14:1934770, Gm14:1935561, Gm14:1935695, Gm14:1935949, Gm14:1936112, Gm14:1936619, Gm14:1936750, Gm14:1936804, Gm14:1936827, Gm14:1937070, Gm14:1937136, Gm14:1937495, Gm14:1938061, Gm14:1940079, Gm14:1940534, Gm14:1940728, Gm14:1940825, Gm14:1941047, Gm14:1941105, Gm14:1944642, Gm14:1700746, Gm14:1706616, Gm14:1706705, Gm14:1706782, Gm14:1708836, Gm14:1709816, Gm14:1712174, Gm14:1717270, Gm14:1722544, Gm14:1723756, Gm14:1725153, Gm14:1725269, Gm14:1726477, Gm14:1731690, Gm14:1738538, Gm14:1739491, Gm14:1739824, Gm14:1785457, Gm14:1787260, Gm14:1796497, Gm14:1840314, Gm14:1842837, Gm14:1850412, Gm14:1850433, Gm14:1850907, Gm14:1851535, Gm14:1852210, Gm14:1859255, Gm14:1860411, Gm14:1909564, Gm14:1910968, Gm14:1935936, Gm14:1936214, Gm14:1936876, Gm14:1939030, Gm14:1939031, Gm14:1939081, Gm14:1940392, Gm14:1941517, Gm14:1989692, Gm14:1989717, Gm14:1992951, Gm14:2003498, Gm14:2004242, Gm14:2004409, Gm14:2006356, Gm14:1698254, Gm14:1698262, Gm14:1698269, Gm14:1701170, Gm14:1701174, Gm14:1701472, Gm14:1701825, Gm14:1702477, Gm14:1702552, Gm14:1702622, Gm14:1704204, Gm14:1705803, Gm14:1706201, Gm14:1706361, Gm14:1706585, Gm14:1706915, Gm14:1708746, Gm14:1713290, Gm14:1718056, Gm14:1718944, Gm14:1719373, Gm14:1723066, Gm14:1726434, Gm14:1726867, Gm14:1727235, Gm14:1728343, Gm14:1730044, Gm14:1731518, Gm14:1736053, Gm14:1738509, Gm14:1738914, Gm14:1739468, Gm14:1739718, Gm14:1739772, Gm14:1749899, Gm14:1785516, Gm14:1785559, Gm14:1786034, Gm14:1786259, Gm14:1793453, Gm14:1796469, Gm14:1797188, Gm14:1798987, Gm14:1800055, Gm14:1842374, Gm14:1850066, Gm14:1850741, Gm14:1850928, Gm14:1852469, Gm14:1854015, Gm14:1854023, Gm14:1859810, Gm14:1860271, Gm14:1862541, Gm14:1867332, Gm14:1868414, Gm14:1919937, Gm14:1935444, Gm14:1936433, Gm14:1937170, Gm14:1937923, Gm14:1938818, Gm14:1939343, Gm14:1939364, Gm14:1939647, Gm14:1939662, Gm14:1939746, Gm14:1939749, Gm14:1940207, Gm14:1940573, Gm14:1941546, Gm14:1945962, Gm14:1946355, Gm14:1990996, Gm14:1991421, Gm14:2001506, Gm14:2001882, Gm14:2003462, Gm14:2003672, Gm14:1697331, Gm14:1698694, Gm14:1700508, Gm14:1701739, Gm14:1701858, Gm14:1702110, Gm14:1702378, Gm14:1706884, Gm14:1706973, Gm14:1708902, Gm14:1711952, Gm14:1712050, Gm14:1712345, Gm14:1717261, Gm14:1722228, Gm14:1722277, Gm14:1723101, Gm14:1724793, Gm14:1725740, Gm14:1726334, Gm14:1727170, Gm14:1730199, Gm14:1736329, Gm14:1736463, Gm14:1736832, Gm14:1737771, Gm14:1738824, Gm14:1738960, Gm14:1743818, Gm14:1756757, Gm14:1760506, Gm14:1778710, Gm14:1783716, Gm14:1784221, Gm14:1786098, Gm14:1797150, Gm14:1797155, Gm14:1799977, Gm14:1811618, Gm14:1812051, Gm14:1824464, Gm14:1839360, Gm14:1843408, Gm14:1850104, Gm14:1851115, Gm14:1851116, Gm14:1855960, Gm14:1858300, Gm14:1860243, Gm14:1860675, Gm14:1866981, Gm14:1869210, Gm14:1872625, Gm14:1902929, Gm14:1913544, Gm14:1914780, Gm14:1935408, Gm14:1936381, Gm14:1936425, Gm14:1939383, Gm14:1988977, Gm14:1989052, Gm14:1990632, Gm14:1990775, Gm14:1991550, Gm14:1999220, Gm14:2003981, Gm14:1697620, Gm14:1697978, Gm14:1699410, Gm14:1700636, Gm14:1701683, Gm14:1701935, Gm14:1702661, Gm14:1702755, Gm14:1704651, Gm14:1704664, Gm14:1712038, Gm14:1712320, Gm14:1712713, Gm14:1712865, Gm14:1712866, Gm14:1713999, Gm14:1719022, Gm14:1728216, Gm14:1731767, Gm14:1735093, Gm14:1735102, Gm14:1736945, Gm14:1743592, Gm14:1748064, Gm14:1749126, Gm14:1754686, Gm14:1757996, Gm14:1760483, Gm14:1783231, Gm14:1783538, Gm14:1783756, Gm14:1786013, Gm14:1787773, Gm14:1792218, Gm14:1799327, Gm14:1799390, Gm14:1799540, Gm14:1800012, Gm14:1800319, Gm14:1811113, Gm14:1811977, Gm14:1824284, Gm14:1837872, Gm14:1837888, Gm14:1851947, Gm14:1858277, Gm14:1861083, Gm14:1887021, Gm14:1903293, Gm14:1910033, Gm14:1919915, Gm14:1934737, Gm14:1946125, Gm14:1958086, Gm14:1986602, Gm14:1987892, Gm14:1988001, Gm14:1989951, Gm14:1991474, Gm14:1997517, Gm14:2006319, Gm14:2017162, Gm14:2019929, Gm14:1701692, Gm14:1702315, Gm14:1702956, Gm14:1703980, Gm14:1706523, Gm14:1711087, Gm14:1712377, Gm14:1714965, Gm14:1727031, Gm14:1727851, Gm14:1728741, Gm14:1729293, Gm14:1730480, Gm14:1730798, Gm14:1731840, Gm14:1732232, Gm14:1732358, Gm14:1732363, Gm14:1732403, Gm14:1735755, Gm14:1735945, Gm14:1743425, Gm14:1744356, Gm14:1746573, Gm14:1748959, Gm14:1750564, Gm14:1753875, Gm14:1754007, Gm14:1755671, Gm14:1756046, Gm14:1760299, Gm14:1760329, Gm14:1761362, Gm14:1766162, Gm14:1780165, Gm14:1780408, Gm14:1782983, Gm14:1789475, Gm14:1799494, Gm14:1799548, Gm14:1799571, Gm14:1811318, Gm14:1825691, Gm14:1834023, Gm14:1841281, Gm14:1846850, Gm14:1887108, Gm14:1887251, Gm14:1935369, Gm14:1969791, Gm14:1981574, Gm14:1981644, Gm14:1983907, Gm14:1986614, Gm14:1986675, Gm14:1987587, Gm14:1988422, Gm14:1988424, Gm14:1988520, Gm14:1988558, Gm14:1989403, Gm14:1991457, Gm14:1991910, Gm14:1992830, Gm14:1993931, Gm14:1997124, Gm14:1998879, Gm14:2004939, Gm14:2005896, Gm14:1698816, Gm14:1701991, Gm14:1710294, Gm14:1710303, Gm14:1711007, Gm14:1711575, Gm14:1713816, Gm14:1728293, Gm14:1729743, Gm14:1730281, Gm14:1730795, Gm14:1732205, Gm14:1744432, Gm14:1751350, Gm14:1755398, Gm14:1756188, Gm14:1761081, Gm14:1761387, Gm14:1762867, Gm14:1765302, Gm14:1777323, Gm14:1779323, Gm14:1780397, Gm14:1800359, Gm14:1803234, Gm14:1811158, Gm14:1825653, Gm14:1869500, Gm14:1876026, Gm14:1876675, Gm14:1876844, Gm14:1876847, Gm14:1879162, Gm14:1884603, Gm14:1904675, Gm14:1944708, Gm14:1954056, Gm14:1954062, Gm14:1967108, Gm14:1972107, Gm14:2006215, Gm14:2011465, Gm14:1704689, Gm14:1711569, Gm14:1713323, Gm14:1728052, Gm14:1729537, Gm14:1732261, Gm14:1732593, Gm14:1735227, Gm14:1744452, Gm14:1754156, Gm14:1755877, Gm14:1756355, Gm14:1759702, Gm14:1780316, Gm14:1801585, Gm14:1810099, Gm14:1810126, Gm14:1810421, Gm14:1823776, Gm14:1875278, Gm14:1875874, Gm14:1902961, Gm14:1910054, Gm14:1949216, Gm14:1957357, Gm14:1957358, Gm14:1960447, Gm14:1980728, Gm14:1984129, Gm14:1992331, Gm14:1993147, Gm14:1995593, Gm14:1995600, Gm14:1996952, Gm14:1997412, Gm14:2004591, Gm14:1645762, Gm14:1713775, Gm14:1716505, Gm14:1729186, Gm14:1729798, Gm14:1732529, Gm14:1753922, Gm14:1759619, Gm14:1759635, Gm14:1760144, Gm14:1761168, Gm14:1771612, Gm14:1777105, Gm14:1778517, Gm14:1779288, Gm14:1779568, Gm14:1804682, Gm14:1810135, Gm14:1825225, Gm14:1828925, Gm14:1846994, Gm14:1848374, Gm14:1874941, Gm14:1875261, Gm14:1875470, Gm14:1879189, Gm14:1881168, Gm14:1923548, Gm14:1923935, Gm14:1955048, Gm14:1955118, Gm14:1955144, Gm14:1959610, Gm14:1960454, Gm14:1967167, Gm14:1970908, Gm14:1976442, Gm14:1981936, Gm14:1982632, Gm14:1982756, Gm14:1984276, Gm14:1994907, Gm14:2013156, Gm14:2019411, Gm14:1711379, Gm14:1713140, Gm14:1727997, Gm14:1744286, Gm14:1757864, Gm14:1759363, Gm14:1765933, Gm14:1767525, Gm14:1767582, Gm14:1768845, Gm14:1775564, Gm14:1778106, Gm14:1778621, Gm14:1780281, Gm14:1780494, Gm14:1805372, Gm14:1809090, Gm14:1810313, Gm14:1812109, Gm14:1812114, Gm14:1824651, Gm14:1875656, Gm14:1877489, Gm14:1878068, Gm14:1903061, Gm14:1950278, Gm14:1950577, Gm14:1950969, Gm14:1970110, Gm14:1982411, Gm14:1983489, Gm14:1983507, Gm14:1983593, Gm14:1993730, Gm14:1993788, Gm14:1993806, Gm14:2006229, Gm14:2015853, Gm14:2359579, Gm14:1579650, Gm14:1764334, Gm14:1764392, Gm14:1764403, Gm14:1767878, Gm14:1805366, Gm14:1825173, Gm14:1879313, Gm14:1886238, Gm14:1899408, Gm14:1960137, Gm14:1971009, Gm14:1983348, Gm14:2011607, Gm14:2012105, Gm14:2340746, Gm14:1767671, Gm14:1771502, Gm14:1771578, Gm14:1803995, Gm14:1805322, Gm14:1809988, Gm14:1825310, Gm14:1888310, Gm14:1889307, Gm14:1957202, Gm14:1981029, Gm14:1981073, Gm14:1981255, Gm14:1992432, Gm14:2010834, Gm14:1759440, Gm14:1775298, Gm14:1775605, Gm14:1804116, Gm14:1804868, Gm14:1806330, Gm14:1806377, Gm14:1889158, Gm14:1899428, Gm14:1926218, Gm14:1928522, Gm14:1957206, Gm14:1959033, Gm14:1969518, Gm14:1975722, Gm14:1981293, Gm14:1983189, Gm14:2013786, Gm14:2014487, Gm14:2191538, Gm14:2191541, Gm14:2191563, Gm14:1711534, Gm14:1773993, Gm14:1808347, Gm14:1808348, Gm14:1812356, Gm14:1812358, Gm14:1874583, Gm14:1971096, Gm14:1975723, Gm14:1976101, Gm14:1998648, Gm14:2006929, Gm14:2013850, Gm14:2014479, Gm14:2014481, Gm14:2101794, Gm14:766045, Gm14:1801323, Gm14:1805026, Gm14:1879302, Gm14:1975774, Gm14:2014429, Gm14:2191662, Gm14:584976, Gm14:2007005, Gm14:1650177, Gm14:1899046, Gm14:806705, Gm14:1976057, Gm14:2747160, or Gm14:1889837;
(f) a marker locus comprising Glyma14g02740.1, Glyma14g02750.1, Glyma14g02780.1, Glyma14g02800.1, Glyma14g02820.1, Glyma14g02920.1, Glyma14g03010.1, Glyma14g03030.1, Glyma14g03050.1, Glyma14g03060.1, Glyma14g03100.1, Glyma14g02710.4, or Glyma14g02730.1;
(g) a marker that detects a polymorphism in Glyma14g02740.1, Glyma14g02750.1, Glyma14g02780.1, Glyma14g02800.1, Glyma14g02820.1, Glyma14g02920.1, Glyma14g03010.1, Glyma14g03030.1, Glyma14g03050.1, Glyma14g03060.1, Glyma14g03100.1, Glyma14g02710.4, and Glyma14g02730.1;
(h) a marker that detects a polymorphism in one or more or SEQ ID NOs: 1-786;
(i) a marker that detects a favorable allele of (a), (b), (c), (d), (e), (f), or (g); and,
(j) a marker locus closely linked to a marker locus of (a), (b), (c), (d), (e), (f), (g), (h), or (i).

10. The method of claim 9, comprising detecting two or more marker loci of (a)-(k).

11. The method of claim 1, wherein the at least one allele is a favorable allele that positively correlates with improved stem canker resistance when compared to a soybean plant lacking the favorable allele, wherein the at least one favorable allele selected from the group consisting of allele A of S03188-1, allele A of S04492-1, allele A of S08256-1, allele T of S08257-1, allele C of S08231-3, allele T of S08231-4, allele T of S08241-1, allele C of S08251-4, allele G of S08251-2, allele C of S08255-3, allele A of S08255-4, allele T of S13721-2, allele A of S01591-1, allele G of S13722-1, allele G of S02987-1, allele G of S00802-1, allele A of S00777-1, allele C of S01799-1, allele A of S00288-1, allele A of S03923-1, allele T of S00341-1, allele T of S01718-1, allele T of S04785-1, allele A of Gm14:1088724, allele A of Gm14:1197243, allele A of Gm14:1594889, allele T of Gm14:1650065, allele C of Gm14:1727084, allele T of Gm14:1727625, allele T of Gm14:1747540, allele C of Gm14:1748042, allele G of Gm14:1748141, allele C of Gm14:1755250, allele A of Gm14:1755572, allele T of Gm14:1788456, allele A of Gm14:1923247, allele G of Gm14:1925222, allele G of Gm14:2129691, allele G of Gm14:3468738, allele A of Gm14:3726937, allele C of Gm14:3727753, allele A of Gm14:4204414, allele A of Gm14:4946161, allele T of Gm14:5028737, allele T of Gm14:5096522, allele A of Gm14:1706695, allele C of Gm14:1723656, allele G of Gm14:1723831, allele G of Gm14:1724319, allele G of Gm14:1738483, allele A of Gm14:1739929, allele A of Gm14:1850843, allele T of Gm14:1853044, allele G of Gm14:1863371, allele G of Gm14:1863436, allele C of Gm14:1863868, allele C of Gm14:1914305, allele T of Gm14:1936105, allele A of Gm14:1939210, allele C of Gm14:1940046, allele C of Gm14:1942461, allele T of Gm14:1942681, allele T of Gm14:1700735, allele G of Gm14:1702258, allele C of Gm14:1715352, allele A of Gm14:1718565, allele C of Gm14:1722078, allele T of Gm14:1722192, allele G of Gm14:1723045, allele A of Gm14:1724087, allele A of Gm14:1724245, allele T of Gm14:1724558, allele T of Gm14:1724603, allele A of Gm14:1725318, allele A of Gm14:1726899, allele T of Gm14:1738054, allele A of Gm14:1784545, allele C of Gm14:1785276, allele C of Gm14:1793750, allele T of Gm14:1842226, allele T of Gm14:1850134, allele A of Gm14:1850654, allele C of Gm14:1850808, allele C of Gm14:1851180, allele G of Gm14:1851369, allele A of Gm14:1851467, allele C of Gm14:1851793, allele G of Gm14:1852388, allele C of Gm14:1852579, allele A of Gm14:1855401, allele A of Gm14:1867651, allele A of Gm14:1867913, allele C of Gm14:1867927, allele C of Gm14:1910547, allele T of Gm14:1910746, allele C of Gm14:1910787, allele A of Gm14:1911679, allele A of Gm14:1916729, allele T of Gm14:1916742, allele T of Gm14:1919121, allele C of Gm14:1934770, allele C of Gm14:1935561, allele G of Gm14:1935695, allele A of Gm14:1935949, allele T of Gm14:1936112, allele A of Gm14:1936619, allele T of Gm14:1936750, allele A of Gm14:1936804, allele G of Gm14:1936827, allele T of Gm14:1937070, allele C of Gm14:1937136, allele C of Gm14:1937495, allele A of Gm14:1938061, allele C of Gm14:1940079, allele T of Gm14:1940534, allele G of Gm14:1940728, allele C of Gm14:1940825, allele G of Gm14:1941047, allele G of Gm14:1941105, allele A of Gm14:1944642, allele T of Gm14:1700746, allele G of Gm14:1706616, allele G of Gm14:1706705, allele A of Gm14:1706782, allele C of Gm14:1708836, allele T of Gm14:1709816, allele T of Gm14:1712174, allele A of Gm14:1717270, allele C of Gm14:1722544, allele T of Gm14:1723756, allele T of Gm14:1725153, allele C of Gm14:1725269, allele G of Gm14:1726477, allele C of Gm14:1731690, allele T of Gm14:1738538, allele T of Gm14:1739491, allele G of Gm14:1739824, allele G of Gm14:1785457, allele T of Gm14:1787260, allele T of Gm14:1796497, allele G of Gm14:1840314, allele A of Gm14:1842837, allele C of Gm14:1850412, allele T of Gm14:1850433, allele T of Gm14:1850907, allele T of Gm14:1851535, allele A of Gm14:1852210, allele C of Gm14:1859255, allele G of Gm14:1860411, allele T of Gm14:1909564, allele G of Gm14:1910968, allele A of Gm14:1935936, allele A of Gm14:1936214, allele G of Gm14:1936876, allele C of Gm14:1939030, allele T of Gm14:1939031, allele A of Gm14:1939081, allele A of Gm14:1940392, allele A of Gm14:1941517, allele G of Gm14:1989692, allele C of Gm14:1989717, allele T of Gm14:1992951, allele A of Gm14:2003498, allele A of Gm14:2004242, allele T of Gm14:2004409, allele A of Gm14:2006356, allele A of Gm14:1698254, allele T of Gm14:1698262, allele C of Gm14:1698269, allele T of Gm14:1701170, allele G of Gm14:1701174, allele T of Gm14:1701472, allele G of Gm14:1701825, allele A of Gm14:1702477, allele G of Gm14:1702552, allele T of Gm14:1702622, allele C of Gm14:1704204, allele A of Gm14:1705803, allele T of Gm14:1706201, allele C of Gm14:1706361, allele A of Gm14:1706585, allele T of Gm14:1706915, allele A of Gm14:1708746, allele A of Gm14:1713290, allele A of Gm14:1718056, allele A of Gm14:1718944, allele T of Gm14:1719373, allele A of Gm14:1723066, allele T of Gm14:1726434, allele G of Gm14:1726867, allele A of Gm14:1727235, allele G of Gm14:1728343, allele A of Gm14:1730044, allele T of Gm14:1731518, allele C of Gm14:1736053, allele C of Gm14:1738509, allele A of Gm14:1738914, allele C of Gm14:1739468, allele C of Gm14:1739718, allele T of Gm14:1739772, allele C of Gm14:1749899, allele A of Gm14:1785516, allele G of Gm14:1785559, allele T of Gm14:1786034, allele A of Gm14:1786259, allele A of Gm14:1793453, allele A of Gm14:1796469, allele A of Gm14:1797188, allele G of Gm14:1798987, allele A of Gm14:1800055, allele T of Gm14:1842374, allele A of Gm14:1850066, allele A of Gm14:1850741, allele C of Gm14:1850928, allele T of Gm14:1852469, allele G of Gm14:1854015, allele A of Gm14:1854023, allele T of Gm14:1859810, allele G of Gm14:1860271, allele G of Gm14:1862541, allele A of Gm14:1867332, allele C of Gm14:1868414, allele C of Gm14:1919937, allele T of Gm14:1935444, allele T of Gm14:1936433, allele G of Gm14:1937170, allele T of Gm14:1937923, allele T of Gm14:1938818, allele T of Gm14:1939343, allele T of Gm14:1939364, allele A of Gm14:1939647, allele T of Gm14:1939662, allele C of Gm14:1939746, allele G of Gm14:1939749, allele A of Gm14:1940207, allele A of Gm14:1940573, allele T of Gm14:1941546, allele A of Gm14:1945962, allele A of Gm14:1946355, allele A of Gm14:1990996, allele C of Gm14:1991421, allele T of Gm14:2001506, allele T of Gm14:2001882, allele G of Gm14:2003462, allele T of Gm14:2003672, allele C of Gm14:1697331, allele G of Gm14:1698694, allele C of Gm14:1700508, allele G of Gm14:1701739, allele G of Gm14:1701858, allele A of Gm14:1702110, allele C of Gm14:1702378, allele T of Gm14:1706884, allele T of Gm14:1706973, allele G of Gm14:1708902, allele T of Gm14:1711952, allele C of Gm14:1712050, allele A of Gm14:1712345, allele G of Gm14:1717261, allele T of Gm14:1722228, allele C of Gm14:1722277, allele C of Gm14:1723101, allele T of Gm14:1724793, allele G of Gm14:1725740, allele T of Gm14:1726334, allele T of Gm14:1727170, allele C of Gm14:1730199, allele G of Gm14:1736329, allele G of Gm14:1736463, allele T of Gm14:1736832, allele G of Gm14:1737771, allele G of Gm14:1738824, allele A of Gm14:1738960, allele G of Gm14:1743818, allele G of Gm14:1756757, allele C of Gm14:1760506, allele T of Gm14:1778710, allele T of Gm14:1783716, allele T of Gm14:1784221, allele G of Gm14:1786098, allele A of Gm14:1797150, allele G of Gm14:1797155, allele T of Gm14:1799977, allele G of Gm14:1811618, allele C of Gm14:1812051, allele A of Gm14:1824464, allele T of Gm14:1839360, allele G of Gm14:1843408, allele T of Gm14:1850104, allele A of Gm14:1851115, allele G of Gm14:1851116, allele G of Gm14:1855960, allele C of Gm14:1858300, allele A of Gm14:1860243, allele C of Gm14:1860675, allele C of Gm14:1866981, allele C of Gm14:1869210, allele A of Gm14:1872625, allele C of Gm14:1902929, allele T of Gm14:1913544, allele T of Gm14:1914780, allele C of Gm14:1935408, allele C of Gm14:1936381, allele A of Gm14:1936425, allele G of Gm14:1939383, allele T of Gm14:1988977, allele A of Gm14:1989052, allele A of Gm14:1990632, allele A of Gm14:1990775, allele G of Gm14:1991550, allele C of Gm14:1999220, allele G of Gm14:2003981, allele G of Gm14:1697620, allele A of Gm14:1697978, allele A of Gm14:1699410, allele G of Gm14:1700636, allele C of Gm14:1701683, allele T of Gm14:1701935, allele T of Gm14:1702661, allele A of Gm14:1702755, allele C of Gm14:1704651, allele C of Gm14:1704664, allele A of Gm14:1712038, allele A of Gm14:1712320, allele A of Gm14:1712713, allele T of Gm14:1712865, allele A of Gm14:1712866, allele T of Gm14:1713999, allele T of Gm14:1719022, allele C of Gm14:1728216, allele T of Gm14:1731767, allele C of Gm14:1735093, allele T of Gm14:1735102, allele A of Gm14:1736945, allele G of Gm14:1743592, allele C of Gm14:1748064, allele C of Gm14:1749126, allele G of Gm14:1754686, allele C of Gm14:1757996, allele C of Gm14:1760483, allele T of Gm14:1783231, allele G of Gm14:1783538, allele T of Gm14:1783756, allele G of Gm14:1786013, allele A of Gm14:1787773, allele C of Gm14:1792218, allele A of Gm14:1799327, allele C of Gm14:1799390, allele T of Gm14:1799540, allele G of Gm14:1800012, allele T of Gm14:1800319, allele T of Gm14:1811113, allele G of Gm14:1811977, allele C of Gm14:1824284, allele C of Gm14:1837872, allele G of Gm14:1837888, allele G of Gm14:1851947, allele G of Gm14:1858277, allele A of Gm14:1861083, allele T of Gm14:1887021, allele C of Gm14:1903293, allele T of Gm14:1910033, allele A of Gm14:1919915, allele A of Gm14:1934737, allele A of Gm14:1946125, allele T of Gm14:1958086, allele T of Gm14:1986602, allele A of Gm14:1987892, allele G of Gm14:1988001, allele A of Gm14:1989951, allele A of Gm14:1991474, allele C of Gm14:1997517, allele C of Gm14:2006319, allele C of Gm14:2017162, allele A of Gm14:2019929, allele C of Gm14:1701692, allele A of Gm14:1702315, allele C of Gm14:1702956, allele A of Gm14:1703980, allele A of Gm14:1706523, allele C of Gm14:1711087, allele C of Gm14:1712377, allele G of Gm14:1714965, allele G of Gm14:1727031, allele A of Gm14:1727851, allele G of Gm14:1728741, allele A of Gm14:1729293, allele A of Gm14:1730480, allele A of Gm14:1730798, allele G of Gm14:1731840, allele G of Gm14:1732232, allele G of Gm14:1732358, allele T of Gm14:1732363, allele T of Gm14:1732403, allele T of Gm14:1735755, allele T of Gm14:1735945, allele A of Gm14:1743425, allele T of Gm14:1744356, allele T of Gm14:1746573, allele A of Gm14:1748959, allele G of Gm14:1750564, allele G of Gm14:1753875, allele A of Gm14:1754007, allele C of Gm14:1755671, allele G of Gm14:1756046, allele T of Gm14:1760299, allele A of Gm14:1760329, allele G of Gm14:1761362, allele T of Gm14:1766162, allele G of Gm14:1780165, allele G of Gm14:1780408, allele C of Gm14:1782983, allele G of Gm14:1789475, allele C of Gm14:1799494, allele C of Gm14:1799548, allele A of Gm14:1799571, allele A of Gm14:1811318, allele T of Gm14:1825691, allele G of Gm14:1834023, allele G of Gm14:1841281, allele T of Gm14:1846850, allele G of Gm14:1887108, allele T of Gm14:1887251, allele C of Gm14:1935369, allele A of Gm14:1969791, allele G of Gm14:1981574, allele G of Gm14:1981644, allele G of Gm14:1983907, allele C of Gm14:1986614, allele G of Gm14:1986675, allele A of Gm14:1987587, allele T of Gm14:1988422, allele C of Gm14:1988424, allele T of Gm14:1988520, allele G of Gm14:1988558, allele G of Gm14:1989403, allele C of Gm14:1991457, allele T of Gm14:1991910, allele T of Gm14:1992830, allele T of Gm14:1993931, allele A of Gm14:1997124, allele C of Gm14:1998879, allele G of Gm14:2004939, allele C of Gm14:2005896, allele A of Gm14:1698816, allele G of Gm14:1701991, allele G of Gm14:1710294, allele C of Gm14:1710303, allele G of Gm14:1711007, allele C of Gm14:1711575, allele G of Gm14:1713816, allele G of Gm14:1728293, allele A of Gm14:1729743, allele A of Gm14:1730281, allele G of Gm14:1730795, allele G of Gm14:1732205, allele A of Gm14:1744432, allele G of Gm14:1751350, allele T of Gm14:1755398, allele G of Gm14:1756188, allele A of Gm14:1761081, allele A of Gm14:1761387, allele A of Gm14:1762867, allele G of Gm14:1765302, allele T of Gm14:1777323, allele A of Gm14:1779323, allele A of Gm14:1780397, allele C of Gm14:1800359, allele A of Gm14:1803234, allele A of Gm14:1811158, allele G of Gm14:1825653, allele G of Gm14:1869500, allele T of Gm14:1876026, allele G of Gm14:1876675, allele G of Gm14:1876844, allele G of Gm14:1876847, allele A of Gm14:1879162, allele T of Gm14:1884603, allele A of Gm14:1904675, allele T of Gm14:1944708, allele C of Gm14:1954056, allele T of Gm14:1954062, allele A of Gm14:1967108, allele C of Gm14:1972107, allele C of Gm14:2006215, allele G of Gm14:2011465, allele G of Gm14:1704689, allele G of Gm14:1711569, allele A of Gm14:1713323, allele G of Gm14:1728052, allele T of Gm14:1729537, allele T of Gm14:1732261, allele A of Gm14:1732593, allele A of Gm14:1735227, allele A of Gm14:1744452, allele A of Gm14:1754156, allele A of Gm14:1755877, allele C of Gm14:1756355, allele A of Gm14:1759702, allele A of Gm14:1780316, allele G of Gm14:1801585, allele A of Gm14:1810099, allele A of Gm14:1810126, allele C of Gm14:1810421, allele C of Gm14:1823776, allele T of Gm14:1875278, allele T of Gm14:1875874, allele G of Gm14:1902961, allele A of Gm14:1910054, allele T of Gm14:1949216, allele G of Gm14:1957357, allele A of Gm14:1957358, allele A of Gm14:1960447, allele C of Gm14:1980728, allele G of Gm14:1984129, allele C of Gm14:1992331, allele T of Gm14:1993147, allele G of Gm14:1995593, allele T of Gm14:1995600, allele G of Gm14:1996952, allele G of Gm14:1997412, allele T of Gm14:2004591, allele G of Gm14:1645762, allele T of Gm14:1713775, allele C of Gm14:1716505, allele A of Gm14:1729186, allele A of Gm14:1729798, allele A of Gm14:1732529, allele T of Gm14:1753922, allele C of Gm14:1759619, allele C of Gm14:1759635, allele A of Gm14:1760144, allele T of Gm14:1761168, allele C of Gm14:1771612, allele T of Gm14:1777105, allele T of Gm14:1778517, allele T of Gm14:1779288, allele A of Gm14:1779568, allele A of Gm14:1804682, allele A of Gm14:1810135, allele G of Gm14:1825225, allele G of Gm14:1828925, allele G of Gm14:1846994, allele A of Gm14:1848374, allele T of Gm14:1874941, allele G of Gm14:1875261, allele A of Gm14:1875470, allele C of Gm14:1879189, allele G of Gm14:1881168, allele A of Gm14:1923548, allele T of Gm14:1923935, allele G of Gm14:1955048, allele C of Gm14:1955118, allele T of Gm14:1955144, allele T of Gm14:1959610, allele A of Gm14:1960454, allele T of Gm14:1967167, allele C of Gm14:1970908, allele G of Gm14:1976442, allele C of Gm14:1981936, allele C of Gm14:1982632, allele C of Gm14:1982756, allele G of Gm14:1984276, allele A of Gm14:1994907, allele G of Gm14:2013156, allele A of Gm14:2019411, allele G of Gm14:1711379, allele T of Gm14:1713140, allele G of Gm14:1727997, allele A of Gm14:1744286, allele T of Gm14:1757864, allele C of Gm14:1759363, allele A of Gm14:1765933, allele C of Gm14:1767525, allele C of Gm14:1767582, allele C of Gm14:1768845, allele T of Gm14:1775564, allele G of Gm14:1778106, allele T of Gm14:1778621, allele T of Gm14:1780281, allele G of Gm14:1780494, allele C of Gm14:1805372, allele A of Gm14:1809090, allele G of Gm14:1810313, allele T of Gm14:1812109, allele A of Gm14:1812114, allele A of Gm14:1824651, allele A of Gm14:1875656, allele G of Gm14:1877489, allele T of Gm14:1878068, allele G of Gm14:1903061, allele A of Gm14:1950278, allele C of Gm14:1950577, allele G of Gm14:1950969, allele T of Gm14:1970110, allele C of Gm14:1982411, allele T of Gm14:1983489, allele T of Gm14:1983507, allele T of Gm14:1983593, allele G of Gm14:1993730, allele T of Gm14:1993788, allele A of Gm14:1993806, allele C of Gm14:2006229, allele C of Gm14:2015853, allele G of Gm14:2359579, allele G of Gm14:1579650, allele T of Gm14:1764334, allele G of Gm14:1764392, allele T of Gm14:1764403, allele C of Gm14:1767878, allele T of Gm14:1805366, allele A of Gm14:1825173, allele C of Gm14:1879313, allele G of Gm14:1886238, allele G of Gm14:1899408, allele G of Gm14:1960137, allele G of Gm14:1971009, allele T of Gm14:1983348, allele C of Gm14:2011607, allele C of Gm14:2012105, allele A of Gm14:2340746, allele C of Gm14:1767671, allele A of Gm14:1771502, allele A of Gm14:1771578, allele G of Gm14:1803995, allele G of Gm14:1805322, allele C of Gm14:1809988, allele C of Gm14:1825310, allele G of Gm14:1888310, allele A of Gm14:1889307, allele A of Gm14:1957202, allele A of Gm14:1981029, allele A of Gm14:1981073, allele T of Gm14:1981255, allele C of Gm14:1992432, allele C of Gm14:2010834, allele C of Gm14:1759440, allele A of Gm14:1775298, allele C of Gm14:1775605, allele C of Gm14:1804116, allele T of Gm14:1804868, allele C of Gm14:1806330, allele T of Gm14:1806377, allele T of Gm14:1889158, allele T of Gm14:1899428, allele T of Gm14:1926218, allele C of Gm14:1928522, allele T of Gm14:1957206, allele A of Gm14:1959033, allele C of Gm14:1969518, allele A of Gm14:1975722, allele C of Gm14:1981293, allele T of Gm14:1983189, allele T of Gm14:2013786, allele G of Gm14:2014487, allele A of Gm14:2191538, allele C of Gm14:2191541, allele T of Gm14:2191563, allele C of Gm14:1711534, allele C of Gm14:1773993, allele G of Gm14:1808347, allele C of Gm14:1808348, allele T of Gm14:1812356, allele C of Gm14:1812358, allele G of Gm14:1874583, allele C of Gm14:1971096, allele G of Gm14:1975723, allele G of Gm14:1976101, allele T of Gm14:1998648, allele T of Gm14:2006929, allele T of Gm14:2013850, allele T of Gm14:2014479, allele T of Gm14:2014481, allele A of Gm14:2101794, allele A of Gm14:766045, allele T of Gm14:1801323, allele A of Gm14:1805026, allele G of Gm14:1879302, allele T of Gm14:1975774, allele G of Gm14:2014429, allele G of Gm14:2191662, allele C of Gm14:584976, allele C of Gm14:2007005, allele A of Gm14:1650177, allele A of Gm14:1899046, allele C of Gm14:806705, allele G of Gm14:1976057, allele T of Gm14:2747160, and allele A of Gm14:1889837.

12. A kit for characterizing at least one soybean plant, germplasm or seed, the kit comprising:
(a) primers or probes for detecting one or more marker loci selected from the group consisting of the marker loci of claim 1, and markers closely linked thereto; and
(b) instructions for using the primers or probes to detect the one or more marker loci and for correlating the detected marker loci with predicted tolerance to stem canker.

13. The kit of claim 12, wherein one or more of marker locus S08231-3, S08241-1, S08251-2, S08255-3, or S08251-4 is detected.

14. The kit of claim 12, wherein the primers or probes comprise one or more of SEQ ID NOs: 1-786.

15. An isolated polynucleotide that detects a marker locus, said isolated polynucleotide comprising at least one detectable label, wherein said marker locus is selected from the group consisting of:
(a) a polymorphism in S03188-1, S04492-1, S08256-1, S08257-1, S08231-3, S08231-4, S08241-1, S08251-4, S08251-2, S08255-3, S08255-4, S13721-2, S01591-1, S13722-1, S02987-1, S00802-1, S00777-1, S01799-1, S00288-1, S03923-1, S00341-1, S01718-1, and S04785-1 on LG B2 (ch 14);
(b) a marker locus comprising S03188-1, S04492-1, S08256-1, S08257-1, S08231-3, S08231-4, 508241-1, S08251-4, S08251-2, S08255-3, S08255-4, S13721-2, S01591-1, S13722-1, S02987-1, S00802-1, S00777-1, S01799-1, S00288-1, S03923-1, S00341-1, S01718-1, and S04785-1 on LG B2 (ch 14);
(c) S03188-1-A, S04492-1-A, S08256-1-01, S08257-1-01, S08231-3-01, S08231-4-Q1, S08241-1-06, S08251-4-07, S08251-2-Q10, S08255-3-03, S08255-4-Q1, S13721-2-Q1, 501591-1-A, 513722-1-01, 502987-1-A, S00802-1-A, S00777-1-A, S01799-1-A, S00288-1-A, S03923-1-A, S00341-1-A, S01718-1-A, and S04785-1-A;
(d) a marker locus comprising Gm14:1088724, Gm14:1197243, Gm14:1594889, Gm14:1650065, Gm14:1727084, Gm14:1727625, Gm14:1747540, Gm14:1748042, Gm14:1748141, Gm14:1755250, Gm14:1755572, Gm14:1788456, Gm14:1923247, Gm14:1925222, Gm14:2129691, Gm14:3468738, Gm14:3726937, Gm14:3727753, Gm14:4204414, Gm14:4946161, Gm14:5028737, Gm14:5096522, Gm14:1706695, Gm14:1723656, Gm14:1723831, Gm14:1724319, Gm14:1738483, Gm14:1739929, Gm14:1850843, Gm14:1853044, Gm14:1863371, Gm14:1863436, Gm14:1863868, Gm14:1914305, Gm14:1936105, Gm14:1939210, Gm14:1940046, Gm14:1942461, Gm14:1942681, Gm14:1700735, Gm14:1702258, Gm14:1715352, Gm14:1718565, Gm14:1722078, Gm14:1722192, Gm14:1723045, Gm14:1724087, Gm14:1724245, Gm14:1724558, Gm14:1724603, Gm14:1725318, Gm14:1726899, Gm14:1738054, Gm14:1784545, Gm14:1785276, Gm14:1793750, Gm14:1842226, Gm14:1850134, Gm14:1850654, Gm14:1850808, Gm14:1851180, Gm14:1851369, Gm14:1851467, Gm14:1851793, Gm14:1852388, Gm14:1852579, Gm14:1855401, Gm14:1867651, Gm14:1867913, Gm14:1867927, Gm14:1910547, Gm14:1910746, Gm14:1910787, Gm14:1911679, Gm14:1916729, Gm14:1916742, Gm14:1919121, Gm14:1934770, Gm14:1935561, Gm14:1935695, Gm14:1935949, Gm14:1936112, Gm14:1936619, Gm14:1936750, Gm14:1936804, Gm14:1936827, Gm14:1937070, Gm14:1937136, Gm14:1937495, Gm14:1938061, Gm14:1940079, Gm14:1940534, Gm14:1940728, Gm14:1940825, Gm14:1941047, Gm14:1941105, Gm14:1944642, Gm14:1700746, Gm14:1706616, Gm14:1706705, Gm14:1706782, Gm14:1708836, Gm14:1709816, Gm14:1712174, Gm14:1717270, Gm14:1722544, Gm14:1723756, Gm14:1725153, Gm14:1725269, Gm14:1726477, Gm14:1731690, Gm14:1738538, Gm14:1739491, Gm14:1739824, Gm14:1785457, Gm14:1787260, Gm14:1796497, Gm14:1840314, Gm14:1842837, Gm14:1850412, Gm14:1850433, Gm14:1850907, Gm14:1851535, Gm14:1852210, Gm14:1859255, Gm14:1860411, Gm14:1909564, Gm14:1910968, Gm14:1935936, Gm14:1936214, Gm14:1936876, Gm14:1939030, Gm14:1939031, Gm14:1939081, Gm14:1940392, Gm14:1941517, Gm14:1989692, Gm14:1989717, Gm14:1992951, Gm14:2003498, Gm14:2004242, Gm14:2004409, Gm14:2006356, Gm14:1698254, Gm14:1698262, Gm14:1698269, Gm14:1701170, Gm14:1701174, Gm14:1701472, Gm14:1701825, Gm14:1702477, Gm14:1702552, Gm14:1702622, Gm14:1704204, Gm14:1705803, Gm14:1706201, Gm14:1706361, Gm14:1706585, Gm14:1706915, Gm14:1708746, Gm14:1713290, Gm14:1718056, Gm14:1718944, Gm14:1719373, Gm14:1723066, Gm14:1726434, Gm14:1726867, Gm14:1727235, Gm14:1728343, Gm14:1730044, Gm14:1731518, Gm14:1736053, Gm14:1738509, Gm14:1738914, Gm14:1739468, Gm14:1739718, Gm14:1739772, Gm14:1749899, Gm14:1785516, Gm14:1785559, Gm14:1786034, Gm14:1786259, Gm14:1793453, Gm14:1796469, Gm14:1797188, Gm14:1798987, Gm14:1800055, Gm14:1842374, Gm14:1850066, Gm14:1850741, Gm14:1850928, Gm14:1852469, Gm14:1854015, Gm14:1854023, Gm14:1859810, Gm14:1860271, Gm14:1862541, Gm14:1867332, Gm14:1868414, Gm14:1919937, Gm14:1935444, Gm14:1936433, Gm14:1937170, Gm14:1937923, Gm14:1938818, Gm14:1939343, Gm14:1939364, Gm14:1939647, Gm14:1939662, Gm14:1939746, Gm14:1939749, Gm14:1940207, Gm14:1940573, Gm14:1941546, Gm14:1945962, Gm14:1946355, Gm14:1990996, Gm14:1991421, Gm14:2001506, Gm14:2001882, Gm14:2003462, Gm14:2003672, Gm14:1697331, Gm14:1698694, Gm14:1700508, Gm14:1701739, Gm14:1701858, Gm14:1702110, Gm14:1702378, Gm14:1706884, Gm14:1706973, Gm14:1708902, Gm14:1711952, Gm14:1712050, Gm14:1712345, Gm14:1717261, Gm14:1722228, Gm14:1722277, Gm14:1723101, Gm14:1724793, Gm14:1725740, Gm14:1726334, Gm14:1727170, Gm14:1730199, Gm14:1736329, Gm14:1736463, Gm14:1736832, Gm14:1737771, Gm14:1738824, Gm14:1738960, Gm14:1743818, Gm14:1756757, Gm14:1760506, Gm14:1778710, Gm14:1783716, Gm14:1784221, Gm14:1786098, Gm14:1797150, Gm14:1797155, Gm14:1799977, Gm14:1811618, Gm14:1812051, Gm14:1824464, Gm14:1839360, Gm14:1843408, Gm14:1850104, Gm14:1851115, Gm14:1851116, Gm14:1855960, Gm14:1858300, Gm14:1860243, Gm14:1860675, Gm14:1866981, Gm14:1869210, Gm14:1872625, Gm14:1902929, Gm14:1913544, Gm14:1914780, Gm14:1935408, Gm14:1936381, Gm14:1936425, Gm14:1939383, Gm14:1988977, Gm14:1989052, Gm14:1990632, Gm14:1990775, Gm14:1991550, Gm14:1999220, Gm14:2003981, Gm14:1697620, Gm14:1697978, Gm14:1699410, Gm14:1700636, Gm14:1701683, Gm14:1701935, Gm14:1702661, Gm14:1702755, Gm14:1704651, Gm14:1704664, Gm14:1712038, Gm14:1712320, Gm14:1712713, Gm14:1712865, Gm14:1712866, Gm14:1713999, Gm14:1719022, Gm14:1728216, Gm14:1731767, Gm14:1735093, Gm14:1735102, Gm14:1736945, Gm14:1743592, Gm14:1748064, Gm14:1749126, Gm14:1754686, Gm14:1757996, Gm14:1760483, Gm14:1783231, Gm14:1783538, Gm14:1783756, Gm14:1786013, Gm14:1787773, Gm14:1792218, Gm14:1799327, Gm14:1799390, Gm14:1799540, Gm14:1800012, Gm14:1800319, Gm14:1811113, Gm14:1811977, Gm14:1824284, Gm14:1837872, Gm14:1837888, Gm14:1851947, Gm14:1858277, Gm14:1861083, Gm14:1887021, Gm14:1903293, Gm14:1910033, Gm14:1919915, Gm14:1934737, Gm14:1946125, Gm14:1958086, Gm14:1986602, Gm14:1987892, Gm14:1988001, Gm14:1989951, Gm14:1991474, Gm14:1997517, Gm14:2006319, Gm14:2017162, Gm14:2019929, Gm14:1701692, Gm14:1702315, Gm14:1702956, Gm14:1703980, Gm14:1706523, Gm14:1711087, Gm14:1712377, Gm14:1714965, Gm14:1727031, Gm14:1727851, Gm14:1728741, Gm14:1729293, Gm14:1730480, Gm14:1730798, Gm14:1731840, Gm14:1732232, Gm14:1732358, Gm14:1732363, Gm14:1732403, Gm14:1735755, Gm14:1735945, Gm14:1743425, Gm14:1744356, Gm14:1746573, Gm14:1748959, Gm14:1750564, Gm14:1753875, Gm14:1754007, Gm14:1755671, Gm14:1756046, Gm14:1760299, Gm14:1760329, Gm14:1761362, Gm14:1766162, Gm14:1780165, Gm14:1780408, Gm14:1782983, Gm14:1789475, Gm14:1799494, Gm14:1799548, Gm14:1799571, Gm14:1811318, Gm14:1825691, Gm14:1834023, Gm14:1841281, Gm14:1846850, Gm14:1887108, Gm14:1887251, Gm14:1935369, Gm14:1969791, Gm14:1981574, Gm14:1981644, Gm14:1983907, Gm14:1986614, Gm14:1986675, Gm14:1987587, Gm14:1988422, Gm14:1988424, Gm14:1988520, Gm14:1988558, Gm14:1989403, Gm14:1991457, Gm14:1991910, Gm14:1992830, Gm14:1993931, Gm14:1997124, Gm14:1998879, Gm14:2004939, Gm14:2005896, Gm14:1698816, Gm14:1701991, Gm14:1710294, Gm14:1710303, Gm14:1711007, Gm14:1711575, Gm14:1713816, Gm14:1728293, Gm14:1729743, Gm14:1730281, Gm14:1730795, Gm14:1732205, Gm14:1744432, Gm14:1751350, Gm14:1755398, Gm14:1756188, Gm14:1761081, Gm14:1761387, Gm14:1762867, Gm14:1765302, Gm14:1777323, Gm14:1779323, Gm14:1780397, Gm14:1800359, Gm14:1803234, Gm14:1811158, Gm14:1825653, Gm14:1869500, Gm14:1876026, Gm14:1876675, Gm14:1876844, Gm14:1876847, Gm14:1879162, Gm14:1884603, Gm14:1904675, Gm14:1944708, Gm14:1954056, Gm14:1954062, Gm14:1967108, Gm14:1972107, Gm14:2006215, Gm14:2011465, Gm14:1704689, Gm14:1711569, Gm14:1713323, Gm14:1728052, Gm14:1729537, Gm14:1732261, Gm14:1732593, Gm14:1735227, Gm14:1744452, Gm14:1754156, Gm14:1755877, Gm14:1756355, Gm14:1759702, Gm14:1780316, Gm14:1801585, Gm14:1810099, Gm14:1810126, Gm14:1810421, Gm14:1823776, Gm14:1875278, Gm14:1875874, Gm14:1902961, Gm14:1910054, Gm14:1949216, Gm14:1957357, Gm14:1957358, Gm14:1960447, Gm14:1980728, Gm14:1984129, Gm14:1992331, Gm14:1993147, Gm14:1995593, Gm14:1995600, Gm14:1996952, Gm14:1997412, Gm14:2004591, Gm14:1645762, Gm14:1713775, Gm14:1716505, Gm14:1729186, Gm14:1729798, Gm14:1732529, Gm14:1753922, Gm14:1759619, Gm14:1759635, Gm14:1760144, Gm14:1761168, Gm14:1771612, Gm14:1777105, Gm14:1778517, Gm14:1779288, Gm14:1779568, Gm14:1804682, Gm14:1810135, Gm14:1825225, Gm14:1828925, Gm14:1846994, Gm14:1848374, Gm14:1874941, Gm14:1875261, Gm14:1875470, Gm14:1879189, Gm14:1881168, Gm14:1923548, Gm14:1923935, Gm14:1955048, Gm14:1955118, Gm14:1955144, Gm14:1959610, Gm14:1960454, Gm14:1967167, Gm14:1970908, Gm14:1976442, Gm14:1981936, Gm14:1982632, Gm14:1982756, Gm14:1984276, Gm14:1994907, Gm14:2013156, Gm14:2019411, Gm14:1711379, Gm14:1713140, Gm14:1727997, Gm14:1744286, Gm14:1757864, Gm14:1759363, Gm14:1765933, Gm14:1767525, Gm14:1767582, Gm14:1768845, Gm14:1775564, Gm14:1778106, Gm14:1778621, Gm14:1780281, Gm14:1780494, Gm14:1805372, Gm14:1809090, Gm14:1810313, Gm14:1812109, Gm14:1812114, Gm14:1824651, Gm14:1875656, Gm14:1877489, Gm14:1878068, Gm14:1903061, Gm14:1950278, Gm14:1950577, Gm14:1950969, Gm14:1970110, Gm14:1982411, Gm14:1983489, Gm14:1983507, Gm14:1983593, Gm14:1993730, Gm14:1993788, Gm14:1993806, Gm14:2006229, Gm14:2015853, Gm14:2359579, Gm14:1579650, Gm14:1764334, Gm14:1764392, Gm14:1764403, Gm14:1767878, Gm14:1805366, Gm14:1825173, Gm14:1879313, Gm14:1886238, Gm14:1899408, Gm14:1960137, Gm14:1971009, Gm14:1983348, Gm14:2011607, Gm14:2012105, Gm14:2340746, Gm14:1767671, Gm14:1771502, Gm14:1771578, Gm14:1803995, Gm14:1805322, Gm14:1809988, Gm14:1825310, Gm14:1888310, Gm14:1889307, Gm14:1957202, Gm14:1981029, Gm14:1981073, Gm14:1981255, Gm14:1992432, Gm14:2010834, Gm14:1759440, Gm14:1775298, Gm14:1775605, Gm14:1804116, Gm14:1804868, Gm14:1806330, Gm14:1806377, Gm14:1889158, Gm14:1899428, Gm14:1926218, Gm14:1928522, Gm14:1957206, Gm14:1959033, Gm14:1969518, Gm14:1975722, Gm14:1981293, Gm14:1983189, Gm14:2013786, Gm14:2014487, Gm14:2191538, Gm14:2191541, Gm14:2191563, Gm14:1711534, Gm14:1773993, Gm14:1808347, Gm14:1808348, Gm14:1812356, Gm14:1812358, Gm14:1874583, Gm14:1971096, Gm14:1975723, Gm14:1976101, Gm14:1998648, Gm14:2006929, Gm14:2013850, Gm14:2014479, Gm14:2014481, Gm14:2101794, Gm14:766045, Gm14:1801323, Gm14:1805026, Gm14:1879302, Gm14:1975774, Gm14:2014429, Gm14:2191662, Gm14:584976, Gm14:2007005, Gm14:1650177, Gm14:1899046, Gm14:806705, Gm14:1976057, Gm14:2747160, or Gm14:1889837;
(e) Gm14:1088724, Gm14:1197243, Gm14:1594889, Gm14:1650065, Gm14:1727084, Gm14:1727625, Gm14:1747540, Gm14:1748042, Gm14:1748141, Gm14:1755250, Gm14:1755572, Gm14:1788456, Gm14:1923247, Gm14:1925222, Gm14:2129691, Gm14:3468738, Gm14:3726937, Gm14:3727753, Gm14:4204414, Gm14:4946161, Gm14:5028737, Gm14:5096522, Gm14:1706695, Gm14:1723656, Gm14:1723831, Gm14:1724319, Gm14:1738483, Gm14:1739929, Gm14:1850843, Gm14:1853044, Gm14:1863371, Gm14:1863436, Gm14:1863868, Gm14:1914305, Gm14:1936105, Gm14:1939210, Gm14:1940046, Gm14:1942461, Gm14:1942681, Gm14:1700735, Gm14:1702258, Gm14:1715352, Gm14:1718565, Gm14:1722078, Gm14:1722192, Gm14:1723045, Gm14:1724087, Gm14:1724245, Gm14:1724558, Gm14:1724603, Gm14:1725318, Gm14:1726899, Gm14:1738054, Gm14:1784545, Gm14:1785276, Gm14:1793750, Gm14:1842226, Gm14:1850134, Gm14:1850654, Gm14:1850808, Gm14:1851180, Gm14:1851369, Gm14:1851467, Gm14:1851793, Gm14:1852388, Gm14:1852579, Gm14:1855401, Gm14:1867651, Gm14:1867913, Gm14:1867927, Gm14:1910547, Gm14:1910746, Gm14:1910787, Gm14:1911679, Gm14:1916729, Gm14:1916742, Gm14:1919121, Gm14:1934770, Gm14:1935561, Gm14:1935695, Gm14:1935949, Gm14:1936112, Gm14:1936619, Gm14:1936750, Gm14:1936804, Gm14:1936827, Gm14:1937070, Gm14:1937136, Gm14:1937495, Gm14:1938061, Gm14:1940079, Gm14:1940534, Gm14:1940728, Gm14:1940825, Gm14:1941047, Gm14:1941105, Gm14:1944642, Gm14:1700746, Gm14:1706616, Gm14:1706705, Gm14:1706782, Gm14:1708836, Gm14:1709816, Gm14:1712174, Gm14:1717270, Gm14:1722544, Gm14:1723756, Gm14:1725153, Gm14:1725269, Gm14:1726477, Gm14:1731690, Gm14:1738538, Gm14:1739491, Gm14:1739824, Gm14:1785457, Gm14:1787260, Gm14:1796497, Gm14:1840314, Gm14:1842837, Gm14:1850412, Gm14:1850433, Gm14:1850907, Gm14:1851535, Gm14:1852210, Gm14:1859255, Gm14:1860411, Gm14:1909564, Gm14:1910968, Gm14:1935936, Gm14:1936214, Gm14:1936876, Gm14:1939030, Gm14:1939031, Gm14:1939081, Gm14:1940392, Gm14:1941517, Gm14:1989692, Gm14:1989717, Gm14:1992951, Gm14:2003498, Gm14:2004242, Gm14:2004409, Gm14:2006356, Gm14:1698254, Gm14:1698262, Gm14:1698269, Gm14:1701170, Gm14:1701174, Gm14:1701472, Gm14:1701825, Gm14:1702477, Gm14:1702552, Gm14:1702622, Gm14:1704204, Gm14:1705803, Gm14:1706201, Gm14:1706361, Gm14:1706585, Gm14:1706915, Gm14:1708746, Gm14:1713290, Gm14:1718056, Gm14:1718944, Gm14:1719373, Gm14:1723066, Gm14:1726434, Gm14:1726867, Gm14:1727235, Gm14:1728343, Gm14:1730044, Gm14:1731518, Gm14:1736053, Gm14:1738509, Gm14:1738914, Gm14:1739468, Gm14:1739718, Gm14:1739772, Gm14:1749899, Gm14:1785516, Gm14:1785559, Gm14:1786034, Gm14:1786259, Gm14:1793453, Gm14:1796469, Gm14:1797188, Gm14:1798987, Gm14:1800055, Gm14:1842374, Gm14:1850066, Gm14:1850741, Gm14:1850928, Gm14:1852469, Gm14:1854015, Gm14:1854023, Gm14:1859810, Gm14:1860271, Gm14:1862541, Gm14:1867332, Gm14:1868414, Gm14:1919937, Gm14:1935444, Gm14:1936433, Gm14:1937170, Gm14:1937923, Gm14:1938818, Gm14:1939343, Gm14:1939364, Gm14:1939647, Gm14:1939662, Gm14:1939746, Gm14:1939749, Gm14:1940207, Gm14:1940573, Gm14:1941546, Gm14:1945962, Gm14:1946355, Gm14:1990996, Gm14:1991421, Gm14:2001506, Gm14:2001882, Gm14:2003462, Gm14:2003672, Gm14:1697331, Gm14:1698694, Gm14:1700508, Gm14:1701739, Gm14:1701858, Gm14:1702110, Gm14:1702378, Gm14:1706884, Gm14:1706973, Gm14:1708902, Gm14:1711952, Gm14:1712050, Gm14:1712345, Gm14:1717261, Gm14:1722228, Gm14:1722277, Gm14:1723101, Gm14:1724793, Gm14:1725740, Gm14:1726334, Gm14:1727170, Gm14:1730199, Gm14:1736329, Gm14:1736463, Gm14:1736832, Gm14:1737771, Gm14:1738824, Gm14:1738960, Gm14:1743818, Gm14:1756757, Gm14:1760506, Gm14:1778710, Gm14:1783716, Gm14:1784221, Gm14:1786098, Gm14:1797150, Gm14:1797155, Gm14:1799977, Gm14:1811618, Gm14:1812051, Gm14:1824464, Gm14:1839360, Gm14:1843408, Gm14:1850104, Gm14:1851115, Gm14:1851116, Gm14:1855960, Gm14:1858300, Gm14:1860243, Gm14:1860675, Gm14:1866981, Gm14:1869210, Gm14:1872625, Gm14:1902929, Gm14:1913544, Gm14:1914780, Gm14:1935408, Gm14:1936381, Gm14:1936425, Gm14:1939383, Gm14:1988977, Gm14:1989052, Gm14:1990632, Gm14:1990775, Gm14:1991550, Gm14:1999220, Gm14:2003981, Gm14:1697620, Gm14:1697978, Gm14:1699410, Gm14:1700636, Gm14:1701683, Gm14:1701935, Gm14:1702661, Gm14:1702755, Gm14:1704651, Gm14:1704664, Gm14:1712038, Gm14:1712320, Gm14:1712713, Gm14:1712865, Gm14:1712866, Gm14:1713999, Gm14:1719022, Gm14:1728216, Gm14:1731767, Gm14:1735093, Gm14:1735102, Gm14:1736945, Gm14:1743592, Gm14:1748064, Gm14:1749126, Gm14:1754686, Gm14:1757996, Gm14:1760483, Gm14:1783231, Gm14:1783538, Gm14:1783756, Gm14:1786013, Gm14:1787773, Gm14:1792218, Gm14:1799327, Gm14:1799390, Gm14:1799540, Gm14:1800012, Gm14:1800319, Gm14:1811113, Gm14:1811977, Gm14:1824284, Gm14:1837872, Gm14:1837888, Gm14:1851947, Gm14:1858277, Gm14:1861083, Gm14:1887021, Gm14:1903293, Gm14:1910033, Gm14:1919915, Gm14:1934737, Gm14:1946125, Gm14:1958086, Gm14:1986602, Gm14:1987892, Gm14:1988001, Gm14:1989951, Gm14:1991474, Gm14:1997517, Gm14:2006319, Gm14:2017162, Gm14:2019929, Gm14:1701692, Gm14:1702315, Gm14:1702956, Gm14:1703980, Gm14:1706523, Gm14:1711087, Gm14:1712377, Gm14:1714965, Gm14:1727031, Gm14:1727851, Gm14:1728741, Gm14:1729293, Gm14:1730480, Gm14:1730798, Gm14:1731840, Gm14:1732232, Gm14:1732358, Gm14:1732363, Gm14:1732403, Gm14:1735755, Gm14:1735945, Gm14:1743425, Gm14:1744356, Gm14:1746573, Gm14:1748959, Gm14:1750564, Gm14:1753875, Gm14:1754007, Gm14:1755671, Gm14:1756046, Gm14:1760299, Gm14:1760329, Gm14:1761362, Gm14:1766162, Gm14:1780165, Gm14:1780408, Gm14:1782983, Gm14:1789475, Gm14:1799494, Gm14:1799548, Gm14:1799571, Gm14:1811318, Gm14:1825691, Gm14:1834023, Gm14:1841281, Gm14:1846850, Gm14:1887108, Gm14:1887251, Gm14:1935369, Gm14:1969791, Gm14:1981574, Gm14:1981644, Gm14:1983907, Gm14:1986614, Gm14:1986675, Gm14:1987587, Gm14:1988422, Gm14:1988424, Gm14:1988520, Gm14:1988558, Gm14:1989403, Gm14:1991457, Gm14:1991910, Gm14:1992830, Gm14:1993931, Gm14:1997124, Gm14:1998879, Gm14:2004939, Gm14:2005896, Gm14:1698816, Gm14:1701991, Gm14:1710294, Gm14:1710303, Gm14:1711007, Gm14:1711575, Gm14:1713816, Gm14:1728293, Gm14:1729743, Gm14:1730281, Gm14:1730795, Gm14:1732205, Gm14:1744432, Gm14:1751350, Gm14:1755398, Gm14:1756188, Gm14:1761081, Gm14:1761387, Gm14:1762867, Gm14:1765302, Gm14:1777323, Gm14:1779323, Gm14:1780397, Gm14:1800359, Gm14:1803234, Gm14:1811158, Gm14:1825653, Gm14:1869500, Gm14:1876026, Gm14:1876675, Gm14:1876844, Gm14:1876847, Gm14:1879162, Gm14:1884603, Gm14:1904675, Gm14:1944708, Gm14:1954056, Gm14:1954062, Gm14:1967108, Gm14:1972107, Gm14:2006215, Gm14:2011465, Gm14:1704689, Gm14:1711569, Gm14:1713323, Gm14:1728052, Gm14:1729537, Gm14:1732261, Gm14:1732593, Gm14:1735227, Gm14:1744452, Gm14:1754156, Gm14:1755877, Gm14:1756355, Gm14:1759702, Gm14:1780316, Gm14:1801585, Gm14:1810099, Gm14:1810126, Gm14:1810421, Gm14:1823776, Gm14:1875278, Gm14:1875874, Gm14:1902961, Gm14:1910054, Gm14:1949216, Gm14:1957357, Gm14:1957358, Gm14:1960447, Gm14:1980728, Gm14:1984129, Gm14:1992331, Gm14:1993147, Gm14:1995593, Gm14:1995600, Gm14:1996952, Gm14:1997412, Gm14:2004591, Gm14:1645762, Gm14:1713775, Gm14:1716505, Gm14:1729186, Gm14:1729798, Gm14:1732529, Gm14:1753922, Gm14:1759619, Gm14:1759635, Gm14:1760144, Gm14:1761168, Gm14:1771612, Gm14:1777105, Gm14:1778517, Gm14:1779288, Gm14:1779568, Gm14:1804682, Gm14:1810135, Gm14:1825225, Gm14:1828925, Gm14:1846994, Gm14:1848374, Gm14:1874941, Gm14:1875261, Gm14:1875470, Gm14:1879189, Gm14:1881168, Gm14:1923548, Gm14:1923935, Gm14:1955048, Gm14:1955118, Gm14:1955144, Gm14:1959610, Gm14:1960454, Gm14:1967167, Gm14:1970908, Gm14:1976442, Gm14:1981936, Gm14:1982632, Gm14:1982756, Gm14:1984276, Gm14:1994907, Gm14:2013156, Gm14:2019411, Gm14:1711379, Gm14:1713140, Gm14:1727997, Gm14:1744286, Gm14:1757864, Gm14:1759363, Gm14:1765933, Gm14:1767525, Gm14:1767582, Gm14:1768845, Gm14:1775564, Gm14:1778106, Gm14:1778621, Gm14:1780281, Gm14:1780494, Gm14:1805372, Gm14:1809090, Gm14:1810313, Gm14:1812109, Gm14:1812114, Gm14:1824651, Gm14:1875656, Gm14:1877489, Gm14:1878068, Gm14:1903061, Gm14:1950278, Gm14:1950577, Gm14:1950969, Gm14:1970110, Gm14:1982411, Gm14:1983489, Gm14:1983507, Gm14:1983593, Gm14:1993730, Gm14:1993788, Gm14:1993806, Gm14:2006229, Gm14:2015853, Gm14:2359579, Gm14:1579650, Gm14:1764334, Gm14:1764392, Gm14:1764403, Gm14:1767878, Gm14:1805366, Gm14:1825173, Gm14:1879313, Gm14:1886238, Gm14:1899408, Gm14:1960137, Gm14:1971009, Gm14:1983348, Gm14:2011607, Gm14:2012105, Gm14:2340746, Gm14:1767671, Gm14:1771502, Gm14:1771578, Gm14:1803995, Gm14:1805322, Gm14:1809988, Gm14:1825310, Gm14:1888310, Gm14:1889307, Gm14:1957202, Gm14:1981029, Gm14:1981073, Gm14:1981255, Gm14:1992432, Gm14:2010834, Gm14:1759440, Gm14:1775298, Gm14:1775605, Gm14:1804116, Gm14:1804868, Gm14:1806330, Gm14:1806377, Gm14:1889158, Gm14:1899428, Gm14:1926218, Gm14:1928522, Gm14:1957206, Gm14:1959033, Gm14:1969518, Gm14:1975722, Gm14:1981293, Gm14:1983189, Gm14:2013786, Gm14:2014487, Gm14:2191538, Gm14:2191541, Gm14:2191563, Gm14:1711534, Gm14:1773993, Gm14:1808347, Gm14:1808348, Gm14:1812356, Gm14:1812358, Gm14:1874583, Gm14:1971096, Gm14:1975723, Gm14:1976101, Gm14:1998648, Gm14:2006929, Gm14:2013850, Gm14:2014479, Gm14:2014481, Gm14:2101794, Gm14:766045, Gm14:1801323, Gm14:1805026, Gm14:1879302, Gm14:1975774, Gm14:2014429, Gm14:2191662, Gm14:584976, Gm14:2007005, Gm14:1650177, Gm14:1899046, Gm14:806705, Gm14:1976057, Gm14:2747160, and Gm14:1889837;
(f) a marker locus comprising Glyma14g02740.1, Glyma14g02750.1, Glyma14g02780.1, Glyma14g02800.1, Glyma14g02820.1, Glyma14g02920.1, Glyma14g03010.1, Glyma14g03030.1, Glyma14g03050.1, Glyma14g03060.1, Glyma14g03100.1, Glyma14g02710.4, or Glyma14g02730.1;
(g) a polymorphism in Glyma14g02740.1, Glyma14g02750.1, Glyma14g02780.1, Glyma14g02800.1, Glyma14g02820.1, Glyma14g02920.1, Glyma14g03010.1, Glyma14g03030.1, Glyma14g03050.1, Glyma14g03060.1, Glyma14g03100.1, Glyma14g02710.4, or Glyma14g02730.1;
(h) an interval flanked by and including BARC-013365-00489 and BARCSOYSSR_14_0281;
(i) an interval flanked by and including S03188-1 and S04785-1 on LG B2;
(j) a marker that detects a favorable allele of (a), (b), (c), (d), (e), (f), or (g);
(k) a marker locus closely linked to a marker locus of (a), (b), (c), (d), (e), (f), (g), (h), (i), or (j); and,
(l) a nucleotide sequence selected from the group consisting of SEQ ID NOs: 1-786.

16. An elite soybean plant, germplasm or seed identified by the method of claim 1, said plant, germplasm or seed comprising at least one quantitative trait locus associated with improved tolerance to stem canker in its genome, wherein said plant or germplasm has improved stem canker resistance when compared to a soybean plant or germplasm lacking said quantitative trait locus in its genome, and wherein said quantitative trait locus is localized to a chromosomal interval flanked by and including markers BARC-013365-00489 and BARCSOYSSR_14_0281 on linkage group B2 (ch 14).

17. The elite soybean plant, germplasm or seed of claim 16 further comprising resistance to a herbicidal formulation comprising a compound selected from the group consisting of a sulfonylurea, a hydroxyphenylpyruvatedioxygenase inhibitor, a glyphosate, a sulfonamide, an imidazolinone, a bialaphos, a phosphinothricin, a mesotrione, an isoxaflutole, an azafenidin, a butafenacil, a sulfosate, a glufosinate, a dicamba, a 2,4-D, a metribuzin, and a protox inhibitor.

18. The elite soybean plant, germplasm or seed of claim 17, wherein resistance to the herbicidal formulation is conferred by a transgene.

19. The elite soybean plant, germplasm or seed of claim 16 further comprising a trait selected from the group consisting of drought tolerance, stress tolerance, disease resistance, enhanced yield, modified oil, modified protein, tolerance to chlorotic conditions, and insect resistance.

20. The elite soybean plant, germplasm or seed of claim 19, wherein the trait is selected from the group consisting of brown stem rot resistance, charcoal rot drought complex resistance, Fusarium resistance, Phytophthora resistance, Soybean Mosaic virus resistance, carlavirus resistance, sudden death syndrome resistance, Sclerotinia resistance, Cercospora resistance, target spot resistance, frogeye leaf spot resistance, soybean cyst nematode resistance, root knot nematode resistance, rust resistance, high oleic, low linolenic, aphid resistance, stink bug resistance, and iron chlorosis deficiency tolerance.

The application's sequence listing, which the Patent Office published only in electronic form, follows.

SEQUENCE LISTING (799 sequences)

SEQ ID NO: 1 - DNA, 401 bp, Glycine max
tttttcttcccccaagtgagtgctaatarttaaaccataaatcacttctatatttcataacaaggacttgtttttctctatttctgtctgrttgcatacatgcatgaaagaaagagtatcarctaattgttttatttgaagaaaaaatagtggcgtgcttaagtgttaaattagtgttcaatagtaggcacagttgtatgwgagtctgcarcttgtaaagttgtagtccatgtttgggggagaaaatacatatactataagaaaaaatatccaaaagttagagggagraatatatgtgattaagactagaacataaagtgatgtgatgggatgggagtttaagttattttgaaacctaatcatctttataaaatttaggacgtgtttggyttcagaaaata

SEQ ID NO: 2 - DNA, 401 bp, Glycine max
gcatgcggttccatcggcgtggaatcgaaatcattctgtgtgtagcagctcgaaagtttcgttgaatagaagtggggttttgacccctcattcgtgtagcaactctttcagggataggaaaagaaaggaactttctaatgatgttccggcttcagccaggttagagacagggaagagtggcttgatgtttcccaagttaaycactagtcctctccgaaggtttcaattgattgattcggactccgatgatgctgatgttggtgttggtgctggtactagtgatgccaataaagttaacccwaatagtcatttggaacaagagaagaaaacatctgctgacgagaacagaaatgaggatctgtggaaggatttttcrccggtgaagaatgtttctgttaata

SEQ ID NO: 3 - DNA, 401 bp, Glycine max
agtggcttgatgtttcccaagttaaycactagtcctctccgaaggtttcaattgattgattcggactccgatgatgctgatgttggtgttggtgctggtactagtgatgccaataaagttaacccwaatagtcatttggaacaagagaagaaaacatctgctgacgagaacagaaatgaggatctgtggaaggatttttcrccggtgaagaatgtttctgttaataggtttcaattgctttcagattccgatgattcggatgttgatgttggtggtgccaataaagttaacactaacagtcgtttggaacaagataataaaacttcggttgatgtgaacggaaataaggatcagtggaaggattttttgccggtgaagaatgtttctgttrgtaagtttca

SEQ ID NO: 4 - DNA, 401 bp, Glycine max
taagaaaacatygcctgatgatgatctatggaaggattttttgccggtgaagaatgtttctgtccccacgccygccttcaatgagatatgtgaagaatactttcgttctgccaattgcaaggaagtrggtggtgatgcatctaaaagttttagtgagaggaatcctggggttagttctagctgccagaggtatcaacaacratgggaatcaacagaccccgttcatcctgctcatagttattttttccatgaggatccgagaattcrgcrgttagtccgcagccgcctgcggaattttaatccactaggtaccatcaacacagtgaatcagcaacctaatttctcacacattgattacatgtaagttgtaacccatgtttgttttttgttttaatcttttg

SEQ ID NO: 5 - DNA, 401 bp, Glycine max
gaagcccaccaacatgctgattggttggctaaacatgaaattgcttcttcatctctwtgtcaagcatgagagtcttgtctgcttcagctacctttgttagatagttgttgtttttatttcrtccactaataaaaaaaattgagttggattagaatttttttttagttcctatartttgaaagtgatatttttgtcttatartttatattttaattcttttttagttyctatagtttaaaaatgatctttttagttyttatagtttgtgttttaattctcttttagtctctatagtttgaaagtgatatttttagtttctataatttgtattttaattattttttaatccttattacagaaacatataaaaatagttagttacaaattagttataaattatc

SEQ ID NO: 6 - DNA, 401 bp, Glycine max
attggtttaatatatagtgggtgaatagatggtatattgaattktggaatttgtgcttattgttatttgcttatggtgaattttgaatgataggtsttggaaaagttgtatagagagagatggggacctgaagatggtgttggcagcatcatcatatcgcctacaagagaattggctggccagttatttgatgtgttgaargttgttggcaaacaccataattttagtgctggccttctcattggtggtcgaaaggacgttgacatggagaaagaacgtgtaaatgagctcaacatattgatttgcacacccggtagactgctgcaacacatggatgaaactcccaattttgattgttcacagatgcaggtcaatataacttttttctttacgtgatagat

SEQ ID NO: 7 - DNA, 401 bp, Glycine max
aggggagaatgrctctagaaagaggattyttcctctttgagatactaaaactttgggtgtatttaatagagctttgactcagtgtgtytttctcccttrtttcttattccttttataggyattagttagcttaaaattcacatgaccttgcgctaagcccgacagytrcgcttagcggtgtgacagtgatcacgcgcttargacgtgcttygcgctaagtgtgtctttagrtttctttgtggattttcttcgcgttaatcttggwctgaccactcagtgagacttygcrttggacttgtcttacgcgctaagagagatrttttaatcttcaacttcttyctygaatttttttcaagtttctacatcaatttaactttaaaacacaaaatttctcttcttta

SEQ ID NO: 8 - DNA, 401 bp, Glycine max
tttttcaaataacttttttctataaaaataaacatctagaatggaaaattataagttgtcccaaacatgttttaaccaacatttttaatgagtgtgaattagtttgtttttacttgtaatcaaatctacagggagtacaaagcaatgttctagttcgatttcatacgaggtatactagcaagtgactctctctaatcttakttgaggaatttttttggaaacttgtaatcataattaatttcaccaagcaaccaagtgaatgactttataactgaggagagcatactcattgtagcgaaacaaaargtgctttctattagttatatgactttattttaatgagacctaccatcattctttctcacttttcctaaggagaaatgtaggcataagaaaggtct

SEQ ID NO: 9 - DNA, 401 bp, Glycine max
caaagaacatataaatagtcttatgttatatacaaacatatcaaatcattactaaccaagaatattatcctctcaactaaccctaagggtcttaattatacaatcatttaccgaatccaatatatgcttgarcttttgatggtagacaaagtcttagtcaacatatcaatcggattgactratgtggctatttctttatgraaaacaaattacatacactcatctcagatgatgaattcactcagcatcatcrgttggatctttarctaaagtcaatgcactatgaatatctcaataaaaaatatgtatgtacatattcaaatccaaatcatgaataaaatcttataattcctttttttttacaagaagatatttaagattttttatttaatactcagcta

SEQ ID NO: 10 - DNA, 401 bp, Glycine max
tatcctctcaactaaccctaagggtcttaattatacaatcatttaccgaatccaatatatgcttgarcttttgatggtagacaaagtcttagtcaacatatcaatcggattgactratgtggctatttctttatgraaaacaaattacatacactcatctcagatgatgaattcactcagcatcatcrgttggatctttarctaaagtcaatgcactatgaatatctcaataaaaaatatgtatgtacatattcaaatccaaatcatgaataaaatcttataattcctttttttttacaagaagatatttaagattttttatttaatactcagctaatttggagttccagattagactatattaaaataaaataacacttttagttacgattttatatcca

SEQ ID NO: 11 - DNA, 401 bp, Glycine max
ttccttttgttaaagacatatacttcacttttttggtagacaaaacaagaataagttaaagcattgctctccaactaatagcacattcataaataatgaagataaaaagcatgttwgggaaactgaaaaatatattagaggaattattttaaaaaaaaaaccacttttgggctctgggccttggcccgacttaattggatyttgcactatatgaaagagagttgggtgggttaatctaaacgagtacatggagtgaacaatattttccctcctctaaggtcccaatttttcttaaaccctaaaacactctcactgaagmagctgctgcagaagagaatcccgatttttccaaaatgtcgatgtcgaagagttccaagatgcttcagtacatcaactaccgt

SEQ ID NO: 12 - DNA, 401 bp, Glycine max
aaattatgaatgcgttttgcstacgtacattgataccagcacgttggaggatgaggacgagttcctctggagtgagaaaactggaccattgatgtgtgcctctcggaagctgtggagttcaatatatgtataatgtgtcgattgaatgtaggatggaaaaagtgttgaatggarttgagttgagaagaatgaatacccagygragaatgtattctgcagcaacaatggcagttgtgtaggctctcatggatcgattgattgtggatatcacagtggctccatctggaactgttagtgctgacagagatttgcagaactcwgcaggatctgccacgtgttcaatcacctgcaaaaaaattcaaagcaaatgaaccaatgcaaggcaaaatgtatccttcaac

SEQ ID NO: 13 - DNA, 401 bp, Glycine max
agatttatgatgccataaaaagatagagatgragataaattgagrtgttgatagagtgtttaaaattatgagtaattcatgtatcacaactcatttttttagggtaaatgatgaatttggtctttgtactttacactaactgtcaatttagtttttgtactatggaaataatcaatttagtctataattatgtaaatataycgacaawttagtcctactatcaactctccttcgtatctattaacgtttttggcaatatggcacatgaaatatgacatgataaatccatgtgttggaagtgaaagccacrtgttggactaggtatgtgtggaccaaattgtcaattggagtatgtgtgtgtttttaccttttattaattcaccatttatcctcttcctttt

SEQ ID NO: 14 - DNA, 401 bp, Glycine max
gttaaagaattgatatttagywgaattgtgactacaaatataaaaattggaggtgttataagcaaaaaagtraaaaataatgaagaaatcagaaatggctcagtccagcgtgcagctcgtgctaagcgagacaggagacacaggcgctaagcgagacgttaaatacgaaagttgatactcgcacccagcragcaacacgcrccaagtgaacaaaaagcagaacacgctaagcgagaatcacatgctaagcgcgcgatccaacataagtagcacgcgctaagcaagaggaggttgctaagcgcacgatttgaacgcattaagcgcaggctgtcgygctgagcgagcccacgaaggyccaaagcctacttcagcarctataaataaagagtcagtccaagggg

SEQ ID NO: 15 - DNA, 401 bp, Glycine max
actttttatgcgtatgcattttctacgcaaacatctagaacttaatcttcatgcattttatttattgaatcttttcaaagatatttgggagataggtaaataaaataarcttgtcatcgtgaggcatcaaggacaagtatatggatagatgtgggtagaatagatctaatcacattgataaagaaaatcatcaactcatayatcctagacaaacaagtcatgttagrtcctaayatttgcatcttattgatttcctccttaattattttgtttttaattttgactcttataaattttagacttaagtctcatcaaactactattaaattttatttttgcattaatactaacttgagtcacgwtatatatttgtctaaattatattcttaattatgttatta

SEQ ID NO: 16 - DNA, 401 bp, Glycine max
accgaccaccgcgctcaaaatctggagattccgccttctgctgcggaaaccgatgaagacgacggcgatgtagattgcagcgaagaggaatctgcagaatctatggaatctgagaaatccgcgcctccttccgactcctccccggcgaacaacaacaacaacaatgaagacgagaaactggagatggtttgtccggtgtgycgcgaattcaacgccgcgacactcacggcggtgaacgcgcacatcgacggatgcctcgcgcagacgatgagagaggagcgtcgccacatgaggattatgaatttgaaatcttcgtcgtcaaagtcgaagccgtcgaagccgctgaagaaacgttccatagccgagattttcatggtggaggagcagccacatctgccaca

SEQ ID NO: 17 - DNA, 401 bp, Glycine max
cactcacggcggtgaacgcgcacatcgacggatgcctcgcgcagacgatgagagaggagcgtcgccacatgaggattatgaatttgaaatcttcgtcgtcaaagtcgaagccgtcgaagccgctgaagaaacgttccatagccgagattttcatggtggaggagcagccacatctgccacagccacagccgcagcctcagytgccgccgcaaatcgagagcgtgttgaagttctggccgttccgcgagggcaaggtggacgatgtatctattaccgttacgaagttcgagtggctttctcggcgactggaggcgctgagatccacgcgcgtagacggtgagtccgccaaatcggaccaaggagatatctcggaggagaagatggagatgttgtgtcctgtt

SEQ ID NO: 18 - DNA, 401 bp, Glycine max
ttttgggcatgtattttgaggtttgactttcagaggacttgggatgcatttggaattggattggggaaatattttctattttcagtaataattacaaaattsacctcaattcatgtttttatgtgctaacatttaaaaacaaaataaagtgaaactaatgacatttttgtaattgttagtgcaaacagaagacatttttgyaaatccagtgyaccttttatcaatttagaacaagaacaaagtagtgaatgtgccgcaaagctgttactatatatacatagactgataagttgaaaacttcaactttgccaatttctattgtcaaacaatacaggtgaaattatgcaaatttttaagtgaaagakatagttgggctatgagggcgagccctggtgcagcgg

SEQ ID NO: 19 - DNA, 401 bp, Glycine max
aaataggtattgttattaataaaaacaatgaaaaattaagttgtaagttcaawgtatttatataagaaaagaatatctaagatactcaatttttcatttatttcatctatgcattttctaaccagaactacatatctaaaaggcatatttaattgtattgacttytggatatactttataaggacatttaagactaaggtrgagataagagctcaaaattaacccttggcccaatcctatggttataagaaattttgwtgtgattccactgtgtaattgtgttctcatcctagtcttgacttcctcatatatatcattgaytgcttgaagatgtgcaacacaaatttctttcttcttaaggccatccacaatatctttcttagtatttgatcatatgcctt

SEQ ID NO: 20 - DNA, 401 bp, Glycine max
atcaattttatcttaaattttagatttgttgtcataaactcgatcagtttgtgaatttgacacctattgttttaaaattttgacagaattaaaaaatagtctgwgaawtttatatttcatcatttatagtaagacagataaattagtccattatattgtcttcaatggagwatcaatttgacaccttaagtgtctttatgycatacatatagaataactttcatatcttagttaataggacaccaaagttttgtgttctcatatttatcgcacttttaccmtatgcgacttatctggctaccatatataattttaagggttgaaaaagctttttgaaactcaatagttttctctcactaaagtgrcaatsttcacccctcaccagtttatcatttttcata

SEQ ID NO: 21 - DNA, 401 bp, Glycine max
ggaggaaaaagaattaatagtttattgttggggtttatttatttttatatgatgattttgtggttgcttgattttgaatcgtgggtcttcagattctatycatggttccttgtcattattgttcactttcatgttttggtgttagagttagggattagccgattaggctttctatgaaattaaaaatagctgtcttttgamgatacaaatgcttttgtttttttagtttgctcgcgagtgatgtagttctagtggaggactaattattagtctttgtaatgattggagaaatgagttgagtaggttttgtctgtgtaaataattatcgttatgttgaagatttcttccctaaacgcaaacttttgttcggagaaaggaagaatcagttgcttccgttcgtg

SEQ ID NO: 22 - DNA, 401 bp, Glycine max
ggacaaaaaaatataacttaatacttattatgggaccgtttcctctttctgtttgtctcctttattgttcattttgatagttaatgttttcaaagtataaaaaaaacaatgaaattgaaattagcattttccctttgtttgctgattataattaaagtcaaggtgataattaacgtaaggaatattttaattttatgatgytacctttaaaggttttaattatgatgttttaattttgaggaaaataataaaaataaattttggatttttgtggattaaatttgtgaataaatgagaatgaatccttttcacttytayaggtgtgaatgaattttttatatgataattaaytgtraagttattaaattttatcatggtaattaaatacatgtatcctcayg

SEQ ID NO: 23 - DNA, 401 bp, Glycine max
ttgaaattagcattttccctttgtttgctgattataattaaagtcaaggtgataattaacgtaaggaatattttaattttatgatgytacctttaaaggttttaattatgatgttttaattttgaggaaaataataaaaataaattttggatttttgtggattaaatttgtgaataaatgagaatgaatccttttcacttytayaggtgtgaatgaattttttatatgataattaaytgtraagttattaaattttatcatggtaattaaatacatgtatcctcaygtttatcttccatagaagacaatgctacttgactcttatgcaggataatttgaatttgaacgttcatggtttttttttactaataaatttgtttgttactattgaacttgaatca

SEQ ID NO: 24 - DNA, 401 bp, Glycine max
ttyccagtaaaagcaataaaatcagaataaaaaagaactttattgtaaatgaaagaaacttccagaactaaaaatgaaaaaaacttaagaacttacacttgattcaacaaagtccgtgaggaatcttggtcgccatcgcgcacccgcgaaccagaaatttcaattccctccattttcccctcaaattcaaatcccctaaastctcccttatatacattacamacacacacctcaattcaatttccatggcgaacttygaagtgccctcattttccctaggcytcgacgatacgcccccccattccccaatccatccacctctttctcccgatcttcacgtctccgactccgactccgactccgatcccgaatcccgacccgacccgcctcgccccctcctc

SEQ ID NO: 25 - DNA, 401 bp, Glycine max
cggatgttgatgttggtggtgccaataaagttaacactaacagtcgtttggaacaagataataaaacttcggttgatgtgaacggaaataaggatcagtggaaggattttttgccggtgaagaatgtttctgttrgtaagtttcaattgctttcagattctgatgattcagatgttgatgtggatgtaggtggtgccaatraagctaaccctaaccgtcatttagaacaaaataagaaaacatygcctgatgatgatctatggaaggattttttgccggtgaagaatgtttctgtccccacgccygccttcaatgagatatgtgaagaatactttcgttctgccaattgcaaggaagtrggtggtgatgcatctaaaagttttagtgagaggaatcctggg

SEQ ID NO: 26 - DNA, 401 bp, Glycine max
tctgatgattcagatgttgatgtggatgtaggtggtgccaatraagctaaccctaaccgtcatttagaacaaaataagaaaacatygcctgatgatgatctatggaaggattttttgccggtgaagaatgtttctgtccccacgccygccttcaatgagatatgtgaagaatactttcgttctgccaattgcaaggaagtrggtggtgatgcatctaaaagttttagtgagaggaatcctggggttagttctagctgccagaggtatcaacaacratgggaatcaacagaccccgttcatcctgctcatagttattttttccatgaggatccgagaattcrgcrgttagtccgcagccgcctgcggaattttaatccactaggtaccatcaacacagtgaa

SEQ ID NO: 27 - DNA, 401 bp, Glycine max
attttttccatgaggatccgagaattcrgcrgttagtccgcagccgcctgcggaattttaatccactaggtaccatcaacacagtgaatcagcaacctaatttctcacacattgattacatgtaagttgtaacccatgtttgttttttgttttaatcttttggtaatgatttaaaaagaaagtgattgtcattttgtattwtatattgtttgggtgtattttgctttcaggggacaatttggtaayggaggagcctcaaacatgcagggagttcaaaatggttttattaattgctcaacaagggggggaaacraatcaagtaatttgaatgttgatggatcttttaatgcttctggaggctgggtggatcccaaaattgtttctccattcagccatgggga

SEQ ID NO: 28 - DNA, 401 bp, Glycine max
gcctgcggaattttaatccactaggtaccatcaacacagtgaatcagcaacctaatttctcacacattgattacatgtaagttgtaacccatgtttgttttttgttttaatcttttggtaatgatttaaaaagaaagtgattgtcattttgtattwtatattgtttgggtgtattttgctttcaggggacaatttggtaayggaggagcctcaaacatgcagggagttcaaaatggttttattaattgctcaacaagggggggaaacraatcaagtaatttgaatgttgatggatcttttaatgcttctggaggctgggtggatcccaaaattgtttctccattcagccatggggaatcttctagaaagaaagcaacaaagaggaatggcwctaagaayag

SEQ ID NO: 29 - DNA, 401 bp, Glycine max
atgcaaaaaacccatacagtatgttacttaagatgyatatagatgcaatgaaattcaaattatcacattacataatgccttttttttgtgtggaaatattgttctatgatttgatgcacacgatcccatcattccaatataactatgtaacmctagatagtgatactcaatctcccattgtttttgtcaacattcttttgrcattaaratgaattgttatatagggaccaattcctacttgatgtttaattcctagttgatgtttaatggcagggaccaattcctagtggttttgaaattataggaccagaaccaaaattgtgaaaagcttttaagcctttttcaaaccaatctattttgtcatattgtataaatctattagaatctgattctttatttac

SEQ ID NO: 30 - DNA, 401 bp, Glycine max
agattgaatacaatttggaattaaattgaaaacttgttgacgagcataaaatctagaaacccttgacaaacaataaactacttgattggcttgtctacgtactaactaattggatggctttagtagaacgtggggccaaaaataaaataaaaaaagcagattgaaccgrtaattaccaatgatttcccttatttgaatttwtctctttcaactccccggaagggggaaaagtgttaaaaaaaaagttcacatttgtcagaagctattaaaaatttaggccttcagttcattcatcgtcttcattgatgattagaagtattctgcttgtcttcrcccttgtcttttggaaatggagaacccttggatttcaatatctgttggcatastctgaaaacccatca

SEQ ID NO: 31 - DNA, 401 bp, Glycine max
ttaaatttttartttttwaatttttttaaaatttaaattttaatctctaaacaaaaatttgattagtcatgtaaaacttttttattaaactttttagtyaaacttttattcagagttaaaaattaaaaatttagttaacctctytgctttatatatcactttctagtttattcaagatttatcgacaatgttgtytttttkacctcatctatwtttttaatgaatagctttgtactgaaaaagaaataaaacaractccgaaattaatcctaaatttggtaaacgctgttgtgggtgttgtaatttgtatccgaattaaatccattgtagagataaagtttatgtgatctaatattatgattgtgttattttatcattggatcaattttaaatattttcta

SEQ ID NO: 32 - DNA, 401 bp, Glycine max
agtgcttcacaagcttccgggtacgccaaaatattgtcaaagcttaactcgggggattgacattgtgcttgagtcatccaaatatgagacaaagagctaatggcaccatatttgccaatggtaacagtaacagctagttctccactctcttcatgtacacctctagctaaatcacactttggactaattgcatttttctcracktcatcgtccatcactgcaccatcactgatactcacttgtttcacaacttctgcattagaagcagaatccagaacatctccaacatcatttctcaaaccacattttccagcactatcagtatcaatcaagttagaatctttctcagaaagcaatttctgggtgtctccaatttcccaacactgacgagaaaacaacgc

SEQ ID NO: 33 - DNA, 401 bp, Glycine max
gtggctgtgcgaagggttgaacctgaaccaggtgatgctctggattcgggtaccaagaaaaactaccattattagcttgggctgctacacaaaaccctaaaacggtttgaataaggatttttttwmttatgaaaattaaaggataaactatatttttaattccaaaacttttttcaactctttttaattcctatttttttycaactcttatwattttgatcttttaacgtttcgggaatgggtcttggattttcgttcccaaacttttttttgytctaatattttgatcatttctttgtttctaaacgggtttgatatgatgtaatatttcttttattatttttttgattaaaaattrcaaataatttgttaaagtgtatcsatcaattttatgacaatga

SEQ ID NO: 34 - DNA, 401 bp, Glycine max
ggcctarcttaacctcaaaagttaactcaatgggtgaggattatccctcacttatatactgtaactctttagccgatgtgagacttgggtttttttcaatacaccctctcacgyccaacaaggtgaccctttgaattaatattggatatgctctgataccatcttaggatctttagaatgcgagtttaggcmtaattyaayctcaaaaactagctcaagaggtaaaggttacccctcacttatatactctaacttgactttatctttagctgatgtaagacttgtcaaaatggcttacaaagtgacataagcttcaaagaaaaaaaaaatcaccaattcttaacagccataaggacaaaaaaccagtagctgctcaaactcagcagtatgaccaccctaaa

SEQ ID NO: 35 - DNA, 401 bp, Glycine max
yattgatggtgaagtattatatcatgtggcgtgtgtaggagataaaaggtccctggatcaaattcccatggcttgtaaagatgcggttgcgattttgattatgttcgatctcaccagtcgttgtacactaaataggtaggctaagagatactattatctttgtcatgagttcggtggagggttcttacttcttagaaacgyaatggtagaaataatkatgatttgcgttttttgttctttgttatgttcgtgcagtgttgttggatggtatagtgaagcaagaaagtggaatcaggtaccataaaaataattttgcagggcttatatatagtactattacttgaattgwttttatttgggaaagtgtctgccactgtttaaattaaagtgtagtttccaaa

SEQ ID NO: 36 - DNA, 401 bp, Glycine max
tgaactcaagcattcgcaaacatccaaatacattcartccagaattgtgtgctgttaaaataaaatggtggttcataatcctacaatagatacatgttaactcattggaagtacatcaaattatcacatgtarkaatagtaaggttaawacggaaattcgagtgtaraatycaaaaaaatcttatttgtayttaaattggygtaaattcaatttttaagcaataaacataatatgttagggcttaacataccaaattacttctgatgtaatrttaataatttttctctatttaatattatcwcagtttttactcatatactttgatattttaaycctgattctttatgtaaaaaagtttaatctatctattttctctcayaaattcctttacaaaaataaa

SEQ ID NO: 37 - DNA, 401 bp, Glycine max
cttcatrcatgaatatatatgtgtgatcaratcacactcaataacaattaaacrcagaaaaagaacaataaaaactgacattacattaaatagataataaaaaagaactmcmaacaatgacacaagagactttacattttagggggttgatgggaatggaagaagaaagggaatgggkaagggaggagaaggggagaatgrctctagaaagaggattyttcctctttgagatactaaaactttgggtgtatttaatagagctttgactcagtgtgtytttctcccttrtttcttattccttttataggyattagttagcttaaaattcacatgaccttgcgctaagcccgacagytrcgcttagcggtgtgacagtgatcacgcgcttargacgtgcttyg

SEQ ID NO: 38 - DNA, 401 bp, Glycine max
aatggaagaagaaagggaatgggkaagggaggagaaggggagaatgrctctagaaagaggattyttcctctttgagatactaaaactttgggtgtatttaatagagctttgactcagtgtgtytttctcccttrtttcttattccttttataggyattagttagcttaaaattcacatgaccttgcgctaagcccgacagytrcgcttagcggtgtgacagtgatcacgcgcttargacgtgcttygcgctaagtgtgtctttagrtttctttgtggattttcttcgcgttaatcttggwctgaccactcagtgagacttygcrttggacttgtcttacgcgctaagagagatrttttaatcttcaacttcttyctygaatttttttcaagtttctacatc

SEQ ID NO: 39 - DNA, 401 bp, Glycine max
tyctygaatttttttcaagtttctacatcaatttaactttaaaacacaaaatttctcttctttaaaatcctacyagtcaagaattaaaatgacattaaaatcctcattattctattaaaaaaacaataaaataaarraaatctaaccattcttrtctaatttgactatcaataaaaccaaattagcagtcatcaatacaayaaaaagcagcctccttttttgttaataaaaaataaccacaacatatatagatgggctaaaagcaaattcaaaactcaacacccatatatataggaaaaacaaattccattcacgtaattgatactcatagataggtcatttattgaacctagttcaatggtgagacgctctaacataggacaactattsaggaataatga

SEQ ID NO: 40 - DNA, 401 bp, Glycine max
catcaatacaayaaaaagcagcctccttttttgttaataaaaaataaccacaacatatatagatgggctaaaagcaaattcaaaactcaacacccatatatataggaaaaacaaattccattcacgtaattgatactcatagataggtcatttattgaacctagttcaatggtgagacgctctaacataggacaactattsaggaataatgagattcgagaaaactcattatgttgcaaggccatcttcatgatcgaatgtcgtacatccatgtcaggttccatatgtagctgttcggraccagtagaaattaccttaaaatatcacacgcaatacgttagttmaaacaatttagataagatattgwaattaatccatatttcagttcattcaaacagaaa

SEQ ID NO: 41 - DNA, 401 bp, Glycine max
tatataggaaaaacaaattccattcacgtaattgatactcatagataggtcatttattgaacctagttcaatggtgagacgctctaacataggacaactattsaggaataatgagattcgagaaaactcattatgttgcaaggccatcttcatgatcgaatgtcgtacatccatgtcaggttccatatgtagctgttcggraccagtagaaattaccttaaaatatcacacgcaatacgttagttmaaacaatttagataagatattgwaattaatccatatttcagttcattcaaacagaaatggaacaagtcaaaagagtgaaagttattatggactataagggtaattatacccttatatataattatataacttgtactaatatatgataacaattg

SEQ ID NO: 42 - DNA, 401 bp, Glycine max
gttattatggactataagggtaattatacccttatatataattatataacttgtactaatatatgataacaattgacaaattaattatagagagaaaaggtgatgaagaatttatatctgaagcacaaaattacatagagtcaaaactttagtagtacaaacatcttccaccaaactgtagataggataaccaaatccttyaaatgaatatatattctagagagaagtcaagatctatctcttccattgcgagtgaatcaatttctatgaggtcaaagttcatccacccacaatacttgaaaattttgagatttggtgcattgactttgaaataatcaaaatcaaagccgcattrgtctaggacgagctgtgtcagacccatgtgtttttcttcacctagg

SEQ ID NO: 43 - DNA, 401 bp, Glycine max
agtgtatcttatgtattttcctrtcaaacatgtaataaatataagtgatttgacaaaatgaaacacccatgcctagaaatagcatataggaaaatattcaatttacactcactttcttttccatacatatctagcttttttcattttatttttatctttatttttcatcacatctatcactttatctctctcttttttctktatttctctctcttccttccacctcataccatctcatttttgggtttacatttatcaggttcatagcatacataagagtgwttctttcaaatggaacttgttagttgtagtgaccatatagacatggacgctcaaacctttatcctacatactatctagattcaataattagtaaatctaaacgtaagtayggtgatmca

SEQ ID NO: 44 - DNA, 401 bp, Glycine max
cttttttctktatttctctctcttccttccacctcataccatctcatttttgggtttacatttatcaggttcatagcatacataagagtgwttctttcaaatggaacttgttagttgtagtgaccatatagacatggacgctcaaacctttatcctacatactatctagattcaataattagtaaatctaaacgtaagtayggtgatmcaaaatataaacgaattaatcttaattaatttcactctatttaatgggtattcgttctaaaatatcctttaattaatttagattttatttttaacaaccttatattattgcgatatgaatcatatgactttcaaaatagagaaagtattctcatctgaaacaagttctcctaaaattgaagtatttcatcagt

SEQ ID NO: 45 - DNA, 401 bp, Glycine max
accraacatcttttgaagtataatcccaagacagtttgcacagtagtrgtagacagtgtaggttcctccacctaatcacccaatgtctaacaacacaatctatgtcamccctgaagttagcttccaaaaccaayctaatacaacctttgaaaaggatcctccaaggctccaaccaataagaggtaagagtatgagcatgtwtatggttcatttagtgcatgatttggccaaggggtgcaatagttawcaataaaatatcactatagaaagttcccatctagataatacctgtgaatacaagaaggttccgaagatggcaatagcagctcctagagcattaataggctgaactggtgtgtggaagataatgattgaagaaactataacagatatacgtttca

SEQ ID NO: 46 - DNA, 401 bp, Glycine max
ttcctattgttttttgtggttattgtctcattgcagtctctatttgtgtcccatccttgtctcattctatgacttaattttaactgctccaatattatttagcttcttaacaaacatcattttttgcagtccatattaaacttgacatagtagaattatgtaagattcttaacaagggatttatatggcttttctccatcrtttcctgtgtattctgtctcacttgtgaaatcttttacctttgccattgttggactgcattcttttagcacatacactgattattggaaaattattgtggttgctcttgattgagactgactgaattctgcttgcatgtagtaatagagaacttcaaattattgtggcaggtttcttaytggtaatctgaagatatggac

SEQ ID NO: 47 - DNA, 401 bp, Glycine max
cttttagcacatacactgattattggaaaattattgtggttgctcttgattgagactgactgaattctgcttgcatgtagtaatagagaacttcaaattattgtggcaggtttcttaytggtaatctgaagatatggactccaagcttcttgcacgyaattcaatatccagcttgtacttaggaactgattgttgcttgtrcaaccgtgaatcastctcttcttagggattgtttttctgatgtctcgatgagaatgtgtaatgttagaagaacaactttatgttttggagggagttattctactaaaacctgagcattagacatataagtcggctgtgtagattttcaggggaaaaatgccggattgcatagacagcgttctgatttgagtgtaggacaa

SEQ ID NO: 48 - DNA, 401 bp, Glycine max
actgattattggaaaattattgtggttgctcttgattgagactgactgaattctgcttgcatgtagtaatagagaacttcaaattattgtggcaggtttcttaytggtaatctgaagatatggactccaagcttcttgcacgyaattcaatatccagcttgtacttaggaactgattgttgcttgtrcaaccgtgaatcastctcttcttagggattgtttttctgatgtctcgatgagaatgtgtaatgttagaagaacaactttatgttttggagggagttattctactaaaacctgagcattagacatataagtcggctgtgtagattttcaggggaaaaatgccggattgcatagacagcgttctgatttgagtgtaggacaagacccccctatatc

SEQ ID NO: 49 - DNA, 401 bp, Glycine max
ctttaactctatatttgttgtcacccttagtatcactaagtcatcactatgcctycacttatttagtgaattttgaatactaaccaacttcttaaaaaaagtgttagagtaacatgaaatgatctagaaaaagaaagagttgcatcatagaaagttttcaaaaagctaataaaaaacatgagtacgttgccactcaatatmtttgagacatccttccccttcactagatatgaaaattaacacatatgcaacctcatcatactcatagcgatgaaatgcatgctcatatttttcaacaacatctaatatcaaatwagtaragttccacctagttggtacatcaagtattaacatgrccttagtggataacttactycttcaaagacttacatccaactcwt

SEQ ID NO: 50 - DNA, 401 bp, Glycine max
tmtttgagacatccttccccttcactagatatgaaaattaacacatatgcaacctcatcatactcatagcgatgaaatgcatgctcatatttttcaacaacatctaatatcaaatwagtaragttccacctagttggtacatcaagtattaacatgrccttagtggataacttactycttcaaagacttacatccaactcwtatttttctaatgaatatgtcaaattcattcaatctatcastaacgattaaattcaaaatataagcagaacatcacatatacatgaactctcaacttattaaattattaytattttattaaaaacactaaagaaaataatgcatttccacaccttccttrattgtcaagttattttttttagtttttaatatatatataa

SEQ ID NO: 51 - DNA, 401 bp, Glycine max
cacatatgcaacctcatcatactcatagcgatgaaatgcatgctcatatttttcaacaacatctaatatcaaatwagtaragttccacctagttggtacatcaagtattaacatgrccttagtggataacttactycttcaaagacttacatccaactcwtatttttctaatgaatatgtcaaattcattcaatctatcastaacgattaaattcaaaatataagcagaacatcacatatacatgaactctcaacttattaaattattaytattttattaaaaacactaaagaaaataatgcatttccacaccttccttrattgtcaagttattttttttagtttttaatatatatataataaattttatattttaattackagttcagattgcttataaa

SEQ ID NO: 52 - DNA, 401 bp, Glycine max
tccgcttcgacgacggcatcgccatcctctctttagaatcttcctgcgtcatgcacttcactcccctctctggttccctttccgttcccgttttgctcacccctggttccttgattctcatgtccggagaagcacgctaccgttggaaacacgaaattaatcgcgcaccggagtttcagatatggcgcgctcaaccattgwctcaatccaaacgcacctctatcaccctcaggaaactttgcccctcctctccctgattccacactcaaccctttctttctgttataataatttcaatgttctattattcagcattcaaaacaaatttcaatgttcaatactaataataattatagtaataacagtaacayatatcttatccatccatctatatatgttat

SEQ ID NO: 53 - DNA, 401 bp, Glycine max
taccatttctcctattgtttttcttcttgtttcttcatttggtttgtgtcaaaaaataattcagttaacactttttattaacagatacttcatcagagtcatcttcttacacatccttatacgattatatttaattcaaggggtattaaaccaaattcctaccatgtgtgtgtagcaaacacaaatgttattggtttaatragactgcataaawgatagtggcttggaatctggcacagtacaaccagattatgttttaaatccactaattccawgcaaaaaaaaaaaaaaaaaaaaaaaggaatcaaattataacatagcacaaagccttgcacattctascaaagtagtttcaagaataaacacccgagactcaaaaatggaggtaacaaggactaaat

SEQ ID NO: 54 - DNA, 401 bp, Glycine max
attgtttttcttcttgtttcttcatttggtttgtgtcaaaaaataattcagttaacactttttattaacagatacttcatcagagtcatcttcttacacatccttatacgattatatttaattcaaggggtattaaaccaaattcctaccatgtgtgtgtagcaaacacaaatgttattggtttaatragactgcataaawgatagtggcttggaatctggcacagtacaaccagattatgttttaaatccactaattccawgcaaaaaaaaaaaaaaaaaaaaaaaggaatcaaattataacatagcacaaagccttgcacattctascaaagtagtttcaagaataaacacccgagactcaaaaatggaggtaacaaggactaaatgaaagagcaggct

SEQ ID NO: 55 - DNA, 401 bp, Glycine max
caaacatgaatttgaatgaaaaatatgttataaacttaagtttgataaaaagtaaatttattataatgtgaaatacttttattcaaatgtatgttgayaaaataattattttgaataacagaataaatcaaaaatagtttttaagaaatgaaataagaaaaataaataaaatacatctctccatttaaaaattcataaatytaatgatgttaaaaaartctaaatatgaaaaayttatttaactcttgcatcctaactacattaaagacaaattatgaaagatataattaacatatcatatcttyacattaggttaagaatatatatatatatatataaaaagtaaaccgcaatacaataycrtgaaagattcaataatttataagaataatctaatgatt

SEQ ID NO: 56 - DNA, 401 bp, Glycine max
attcttaaaacttatgtatgattgagtgttcacaaatcatgaaatattttggatttattatggtttataaattataactttatgtaataataatagtttacttttagatcacattataattgatatttaaagttatatttactatcacccaactataattttatctarcatatttatcttgaaaaaaaaaactctatctryctgaattaaaactgagagtgtttggctgcatcctatgatctggtttaaacatgctaaagataaagaccgtgtgttggagaagttggtaatttgcggtgcacgttactttaaagtttaaacaaacaggtcttaaagtcaaaatgatgcgcgctgcaaggaactgtgtgactgtgtattagtgggggcgcctcatattctaa

SEQ ID NO: 57 - DNA, 401 bp, Glycine max
tttgagtgyaactaggtcatctgcatcgtcatgatgacmtatcgcgayatcaatgtcamaccaaaaaagcttagttgtaagtayactgagatctacatggccctcaacatcgtcctccagagcgttaacaacacctgccttgtcaccatgctcgcaaccatggacaacgagagcattgccaagatgttccaagtgccatgytagttacatttgtatcatgtgtgaacgaaggttaacaaaaatagtgaagacttgacmgttggaccaacttatcacaatatttgtacatttgtggactaaattgattatttcatatttcaaggatcaaattatcrttggatgcatttttcagggactaaattgatcatttacacatagatgtagactttcttatttcataa

SEQ ID NO: 58 - DNA, 401 bp, Glycine max
ctgccttgtcaccatgctcgcaaccatggacaacgagagcattgccaagatgttccaagtgccatgytagttacatttgtatcatgtgtgaacgaaggttaacaaaaatagtgaagacttgacmgttggaccaacttatcacaatatttgtacatttgtggactaaattgattatttcatatttcaaggatcaaattatcrttggatgcatttttcagggactaaattgatcatttacacatagatgtagactttcttatttcataactatttctaaaaggtaaaaatagtttttatagctttttgaaaataaatatttttaaaggaaaatgttttttggacacctaataataatatgctacccaatatatagggagagaaaaaaagagaaaaataatata

SEQ ID NO: 59 - DNA, 401 bp, Glycine max
tcttatttcataactatttctaaaaggtaaaaatagtttttatagctttttgaaaataaatatttttaaaggaaaatgttttttggacacctaataataatatgctacccaatatatagggagagaaaaaaagagaaaaataatataagtatgataagatttatgatgccataaaaagatagagatgragataaattgagrtgttgatagagtgtttaaaattatgagtaattcatgtatcacaactcatttttttagggtaaatgatgaatttggtctttgtactttacactaactgtcaatttagtttttgtactatggaaataatcaatttagtctataattatgtaaatataycgacaawttagtcctactatcaactctccttcgtatctattaac

SEQ ID NO: 60 - DNA, 401 bp, Glycine max
tgatgccataaaaagatagagatgragataaattgagrtgttgatagagtgtttaaaattatgagtaattcatgtatcacaactcatttttttagggtaaatgatgaatttggtctttgtactttacactaactgtcaatttagtttttgtactatggaaataatcaatttagtctataattatgtaaatataycgacaawttagtcctactatcaactctccttcgtatctattaacgtttttggcaatatggcacatgaaatatgacatgataaatccatgtgttggaagtgaaagccacrtgttggactaggtatgtgtggaccaaattgtcaattggagtatgtgtgtgtttttaccttttattaattcaccatttatcctcttcctttttacattt

SEQ ID NO: 61 - DNA, 401 bp, Glycine max
gtggccrctgttttygtttgattttttcctgtgcgttgacggtgaaagacaactttataaggtaagatgttttttgtttgactagactttattgatgacctccattctcgtaacawttctccatgtgacagtcatttttgttagatttcttcctwttttttttgttattgwagacaaacaagggattaaacatgtgttagrgtttagggtttsttgatgatgctttgatgaactgaaacaatgatgctctgttttgggtatgaaaaggaataaattttattattgatacaaagatgctttgtttcctcctttttttactctattttgtgtgwttccttttatagaatgtttgataagattaaccttttgttgcactacaaaggtcratttgtctgaaatat

SEQ ID NO: 62 - DNA, 401 bp, Glycine max
tcatttttgttagatttcttcctwttttttttgttattgwagacaaacaagggattaaacatgtgttagrgtttagggtttsttgatgatgctttgatgaactgaaacaatgatgctctgttttgggtatgaaaaggaataaattttattattgatacaaagatgctttgtttcctcctttttttactctattttgtgtgwttccttttatagaatgtttgataagattaaccttttgttgcactacaaaggtcratttgtctgaaatatgacaaaarggtgttggagtatgtatgcggagggtgaagaatgttaatgggactttgragactaacctgatgtatgtttttttattgtccatgatacatgcaagtttttaaattcaaattattgttatagac

SEQ ID NO: 63 - DNA, 401 bp, Glycine max
ttaaacatgtgttagrgtttagggtttsttgatgatgctttgatgaactgaaacaatgatgctctgttttgggtatgaaaaggaataaattttattattgatacaaagatgctttgtttcctcctttttttactctattttgtgtgwttccttttatagaatgtttgataagattaaccttttgttgcactacaaaggtcratttgtctgaaatatgacaaaarggtgttggagtatgtatgcggagggtgaagaatgttaatgggactttgragactaacctgatgtatgtttttttattgtccatgatacatgcaagtttttaaattcaaattattgttatagaccatgttgtcataaagttatatttgatggggaacattttgtcgttctagaagaaa

SEQ ID NO: 64 - DNA, 401 bp, Glycine max
gtttsttgatgatgctttgatgaactgaaacaatgatgctctgttttgggtatgaaaaggaataaattttattattgatacaaagatgctttgtttcctcctttttttactctattttgtgtgwttccttttatagaatgtttgataagattaaccttttgttgcactacaaaggtcratttgtctgaaatatgacaaaarggtgttggagtatgtatgcggagggtgaagaatgttaatgggactttgragactaacctgatgtatgtttttttattgtccatgatacatgcaagtttttaaattcaaattattgttatagaccatgttgtcataaagttatatttgatggggaacattttgtcgttctagaagaaaattttatcatgaaattaggaaga

SEQ ID NO: 65 - DNA, 401 bp, Glycine max
actttgragactaacctgatgtatgtttttttattgtccatgatacatgcaagtttttaaattcaaattattgttatagaccatgttgtcataaagttatatttgatggggaacattttgtcgttctagaagaaaattttatcatgaaattaggaagaagagccttttatttttaaaatagtcattacctttataaatttwaaaatcgaaattaaaaaaatcactaacattttagttcaaaacattgtaactaatgtggaacatctyttacgcacatggatttgccacatcatccagaacrtgtcacgttggtattcaatgttaacatgaaccgatgagactttgtgttagaattaaattatcgatatatttatccatttttttgatacggtggcaatttt

SEQ ID NO: 66 - DNA, 401 bp, Glycine max
attattgttatagaccatgttgtcataaagttatatttgatggggaacattttgtcgttctagaagaaaattttatcatgaaattaggaagaagagccttttatttttaaaatagtcattacctttataaatttwaaaatcgaaattaaaaaaatcactaacattttagttcaaaacattgtaactaatgtggaacatctyttacgcacatggatttgccacatcatccagaacrtgtcacgttggtattcaatgttaacatgaaccgatgagactttgtgttagaattaaattatcgatatatttatccatttttttgatacggtggcaatttttataaattatttttaaaattaaaaagacaaaattattctttatttttttgtcttattttctaacct

SEQ ID NO: 67 - DNA, 401 bp, Glycine max
agacaaaattattctttatttttttgtcttattttctaacctcaaactgtttttttaagcattgcaattaawtttttttgtctctaatggaatctcaaatatctatataagtttccagttcttttaggacaactatggcattagttcttaatccaaaatttaaacttattttaaaaaattataaaagaatcaaataatttmttgttttcagtttaagtctagtattctaaatctaaaggctcatgttgaatgagaatattttaagaaattatttttctaccataatgttttttagaagattttcttatatttaagtgtttttagaagttataatcacattcagtgaatcataataggtcttatcttaatctcctataccgaatatttaagaaagtataaat

SEQ ID NO: 68 - DNA, 401 bp, Glycine max
aaaataattaataaccatgaagttagacaatttttaatttttctttatatatgcactaatacwcacaccttattcagtgattttgaagaaacgttgtaaaaagtattatggtcaattaataaaaatgaaaactgacgaaaactaaatttgtaaactaacttgcatttttagaggattatatacatctttggataattatartgtacaatttcttcttacaagctagctttataatttatattaatcttaacgagttgagctctatatatctaaatttgtccaatttagatgcattctatccaggtatattttatgtacaaatgtccagattgaatacatcttattcaactgcgacaaacctgcatgcgtcctgtcttagaccatttctttttaagrtctcg

SEQ ID NO: 69 - DNA, 401 bp, Glycine max
tctagaacttaatcttcatgcattttatttattgaatcttttcaaagatatttgggagataggtaaataaaataarcttgtcatcgtgaggcatcaaggacaagtatatggatagatgtgggtagaatagatctaatcacattgataaagaaaatcatcaactcatayatcctagacaaacaagtcatgttagrtcctaayatttgcatcttattgatttcctccttaattattttgtttttaattttgactcttataaattttagacttaagtctcatcaaactactattaaattttatttttgcattaatactaacttgagtcacgwtatatatttgtctaaattatattcttaattatgttattagttctaagtatacctttaattagacttaaagac

SEQ ID NO: 70 - DNA, 401 bp, Glycine max
acaaaacattgtgtattaaagtctctttttaaatatcttttatccaaaaaaaataaatmatatcactgtaaatttttccttagaatcaattttagaaaattattatatgaatacatattcaagcatacatttgagtgttaagaaagtctagttcacttaatcaaataaggatgtgagttattattataaatttcttaacaytgtctttaattcttacagataaaaaaatatacacttaarcaatgaatgtttttatcttctttttttctgagctatcaacatattaacaacaaaactyaagaaatgaaagtattaaaagaatattgactyttattgttctctcctatatcacacctctttcttaccctttcttttgtcatttcttggtcaccaartacaaa

SEQ ID NO: 71 - DNA, 401 bp, Glycine max
ttaacaytgtctttaattcttacagataaaaaaatatacacttaarcaatgaatgtttttatcttctttttttctgagctatcaacatattaacaacaaaactyaagaaatgaaagtattaaaagaatattgactyttattgttctctcctatatcacacctctttcttaccctttcttttgtcatttcttggtcaccaartacaaagtgaaagtgaatatatataatttcataagactcaagaaatgaaagtattaaaagaaagaaagtaagaaaatcatactaatttttgctactytatctattgtcacatctctttctcatcatttctttatcatctcttctcatcaaatatgaagcaaaagtaaatctaaattaatagaaytcaaaaaaggaaagta

SEQ ID NO: 72 - DNA, 401 bp, Glycine max
aaaactyaagaaatgaaagtattaaaagaatattgactyttattgttctctcctatatcacacctctttcttaccctttcttttgtcatttcttggtcaccaartacaaagtgaaagtgaatatatataatttcataagactcaagaaatgaaagtattaaaagaaagaaagtaagaaaatcatactaatttttgctactytatctattgtcacatctctttctcatcatttctttatcatctcttctcatcaaatatgaagcaaaagtaaatctaaattaatagaaytcaaaaaaggaaagtattagaagaaaagaagaaaaacaatttttcttttttctcccatctgtacacatcttttttaaaaaaggaagaaccataaagattaagtagtaattgaa

SEQ ID NO: 73 - DNA, 401 bp, Glycine max
ctcatcatttctttatcatctcttctcatcaaatatgaagcaaaagtaaatctaaattaatagaaytcaaaaaaggaaagtattagaagaaaagaagaaaaacaatttttcttttttctcccatctgtacacatcttttttaaaaaaggaagaaccataaagattaagtagtaattgaaatttgagtttctcctaaggtgrcacttattatttaatgtataatgtgacatgatttatcatttagttcttaattatattkatttatttcttattatttaagtggacctcaaaaccatgaaaataacgcgttaattgtatataataaaaaaacaaaacagagtaagtaatttggaaactattkataataatatatatatttttttttataaaaaaagaagtga

SEQ ID NO: 74 - DNA, 401 bp, Glycine max
aatagaaytcaaaaaaggaaagtattagaagaaaagaagaaaaacaatttttcttttttctcccatctgtacacatcttttttaaaaaaggaagaaccataaagattaagtagtaattgaaatttgagtttctcctaaggtgrcacttattatttaatgtataatgtgacatgatttatcatttagttcttaattatattkatttatttcttattatttaagtggacctcaaaaccatgaaaataacgcgttaattgtatataataaaaaaacaaaacagagtaagtaatttggaaactattkataataatatatatatttttttttataaaaaaagaagtgatatgatgaaggtagaaagcgcgtggattgatgggtgatcgcgtatggtggattgtttg

SEQ ID NO: 75 - DNA, 401 bp, Glycine max
gtgcmgataatttcgagtgtctattagaacccaacctaggaggtctatatagaaccaatggaaatcggaaaacaatgtcagtttgtggttacgctggccgaaatttgaaagtggaagtaaattagtcaagtatttaacttggctagccatgaaggttactcgatgatgatataaggatgatatgattttgctgccaactcwatccttagaagtgaaatttataacttggctgcccttactgtatcagtaatggcatcttattatagygtctagattgttttaaataacgtttctagactaatcttagtaaatactttattttccaaaaataattcgcgaactctggttctatgtttttcctacctatcatttctttttcaagattaatagattggattttt

SEQ ID NO: 76 - DNA, 401 bp, Glycine max
tattttgaggtttgactttcagaggacttgggatgcatttggaattggattggggaaatattttctattttcagtaataattacaaaattsacctcaattcatgtttttatgtgctaacatttaaaaacaaaataaagtgaaactaatgacatttttgtaattgttagtgcaaacagaagacatttttgyaaatccagtgyaccttttatcaatttagaacaagaacaaagtagtgaatgtgccgcaaagctgttactatatatacatagactgataagttgaaaacttcaactttgccaatttctattgtcaaacaatacaggtgaaattatgcaaatttttaagtgaaagakatagttgggctatgagggcgagccctggtgcagcggtaaagttgtgc

SEQ ID NO: 77 - DNA, 401 bp, Glycine max
acaatctttgacccaatacggatatccatttgttggaaattctatgaaattggaatcttatactatactaattgtcttctttttcttcccccaagtgagtgctaatarttaaaccataaatcacttctatatttcataacaaggacttgtttttctctatttctgtctgrttgcatacatgcatgaaagaaagagtatcarctaattgttttatttgaagaaaaaatagtggcgtgcttaagtgttaaattagtgttcaatagtaggcacagttgtatgwgagtctgcarcttgtaaagttgtagtccatgtttgggggagaaaatacatatactataagaaaaaatatccaaaagttagagggagraatatatgtgattaagactagaacataaagtgat

SEQ ID NO: 78 - DNA, 401 bp, Glycine max
cccaagtgagtgctaatarttaaaccataaatcacttctatatttcataacaaggacttgtttttctctatttctgtctgrttgcatacatgcatgaaagaaagagtatcarctaattgttttatttgaagaaaaaatagtggcgtgcttaagtgttaaattagtgttcaatagtaggcacagttgtatgwgagtctgcarcttgtaaagttgtagtccatgtttgggggagaaaatacatatactataagaaaaaatatccaaaagttagagggagraatatatgtgattaagactagaacataaagtgatgtgatgggatgggagtttaagttattttgaaacctaatcatctttataaaatttaggacgtgtttggyttcagaaaatatgtattcaat

SEQ ID NO: 79 - DNA, 401 bp, Glycine max
ctgrttgcatacatgcatgaaagaaagagtatcarctaattgttttatttgaagaaaaaatagtggcgtgcttaagtgttaaattagtgttcaatagtaggcacagttgtatgwgagtctgcarcttgtaaagttgtagtccatgtttgggggagaaaatacatatactataagaaaaaatatccaaaagttagagggagraatatatgtgattaagactagaacataaagtgatgtgatgggatgggagtttaagttattttgaaacctaatcatctttataaaatttaggacgtgtttggyttcagaaaatatgtattcaatttttattttyataaataaatataaaaatcttatcttgcatttactttgtttactattttccatgttcyacaaattat

SEQ ID NO: 80 - DNA, 401 bp, Glycine max
gattatcattgatccaatatcttaacatttgatggattgtctcctttctttgtacattctgtaactccatttatcagttgcatttaggagttcattgcaatgatggttttrctttaatttcagtgtggtaatgtactagttccaacttcttatgttggayttcaattatgtatggctctccagaatggcttgtgagcatcyaaaaataagttttcatatggagtaatctatttcagtatttcctttgctacatttttttcttgtccstttgtttcttttgttctcccctttcaatatgcatacttaakacatggatatctatctctctatatatggatacaaagttttcgtgttcttgattcccaagcgtagtgcttctttcccaatgctgcctatcagta

SEQ ID NO: 81 - DNA, 401 bp, Glycine max
atattgtcttttatatataatatggctttgctttaaaatattatctccacgacctttagttagtgttccgttggtragaaatataagggggaagggaagataagtattattataattttttctttgtttgatccaaaattttggagaaggtagttaaaattgttcactcaaaattagagagatttgaaggactggacaacwtttacattagttagactaaattatctcttaacttaattttatttgaccattttaaataattttctccccattcttatgaactatatagcaggtgtctttcttttctgctataatctcttctgtcagttcctttcaaaatcttttcttttgaaagaaactgatagcattgtctatttcattacgttcccttgtataaattt

SEQ ID NO: 82 - DNA, 401 bp, Glycine max
gyaaaaggtggtgaaaaaaaaccgaaaaagctgtgtaaaagataatttgttaattgccaacgtgrccttttctggtyggaatttgatcatatacaatattcatattcatttgggtaatttttttagtgagcaaattcaattttgcaggagataaaattgattttagaagaaatataattttgttaarccttttgttatttwcttgactttcacaaacaatgtttgagataattaataaataattgaattttttaattatgtctgtagaagtttaattttttactgtatatatgaaaatattttatagaagaaaaataagcatacgttaaccattttttttgctgaamaaaattataactatcggtaattatmatttcttttagaattatattattcatata

SEQ ID NO: 83 - DNA, 401 bp, Glycine max
ttatttaaataaaatcaatctttcttgagctcgtcttaaaatatmttttttcacgtataaattaattaatattttaacgtcattatccttgaaataaatcctaataaataaaatataaaagaaaccccccaccatcgttcgatcattcaaatcakaactcttccaccagcagccttaacaaacatcgtagcktataaatcragtagggccaaacgacatcgtataacatttccccgcgcgtggaatcatgataactaataacagatacattgaccgtataaacatacsaaaagacgtacacctcttttcgtatgtatatttgtattgtcactgtgttcgtccttttctcagcaaaatctctgaaacagcgaaactctccctctctctctcttctgtacttt

SEQ ID NO: 84 - DNA, 401 bp, Glycine max
tggtttttttttactaataaatttgtttgttactattgaacttgaatcattggttttttaaaaagaatatattttcagaggaaaaaaagaagatttaattgcattctttggagagtgtattggattgtggttttaaaagattatgtaaaaatgtcgtaactctgtratatttatttagtttttttgctatcatgactgtgyaatttggtcatttagattttaattgtgttactttaatcccttaaattttgttmaaattataataatatccttccattttgattttatttaatatattgaaattaattgatataacaaattaacatttaaatacattataccatctgaaaaacataaaaatgtggtgacctacaaagatagttagactgttattgacttaa

SEQ ID NO: 85 - DNA, 401 bp, Glycine max
aactctttcagggataggaaaagaaaggaactttctaatgatgttccggcttcagccaggttagagacagggaagagtggcttgatgtttcccaagttaaycactagtcctctccgaaggtttcaattgattgattcggactccgatgatgctgatgttggtgttggtgctggtactagtgatgccaataaagttaacccwaatagtcatttggaacaagagaagaaaacatctgctgacgagaacagaaatgaggatctgtggaaggatttttcrccggtgaagaatgtttctgttaataggtttcaattgctttcagattccgatgattcggatgttgatgttggtggtgccaataaagttaacactaacagtcgtttggaacaagataataaaacttc

SEQ ID NO: 86 - DNA, 401 bp, Glycine max
attggtttacatcgccagaaggaagaaaggtatgagaaaaaatcttaaaattttgatgtttaatgttattaagtattaactggttaaatttatttacttttctcatgttagatgctggtcataagaagttatgcgagctgttttgttatgttgtttaaaattgaaatgcaaaaaacccatacagtatgttacttaagatgyatatagatgcaatgaaattcaaattatcacattacataatgccttttttttgtgtggaaatattgttctatgatttgatgcacacgatcccatcattccaatataactatgtaacmctagatagtgatactcaatctcccattgtttttgtcaacattcttttgrcattaaratgaattgttatatagggaccaattcct

SEQ ID NO: 87 - DNA, 401 bp, Glycine max
ggtcataagaagttatgcgagctgttttgttatgttgtttaaaattgaaatgcaaaaaacccatacagtatgttacttaagatgyatatagatgcaatgaaattcaaattatcacattacataatgccttttttttgtgtggaaatattgttctatgatttgatgcacacgatcccatcattccaatataactatgtaacmctagatagtgatactcaatctcccattgtttttgtcaacattcttttgrcattaaratgaattgttatatagggaccaattcctacttgatgtttaattcctagttgatgtttaatggcagggaccaattcctagtggttttgaaattataggaccagaaccaaaattgtgaaaagcttttaagcctttttcaaaccaat

SEQ ID NO: 88 - DNA, 401 bp, Glycine max
tttcttgggccttttcttccgtctatcttgagctgaggatacgagatgcttcgcctgwattatttgggctctttttgttgatttttattggctccatttgttgatgtttaatgcacatgtaccaaataaatactgaagtttgcagacgatgtaaactwaaattaggacatcatatttgtgagcggaaacttaaatcaggasrtacgtgagattagcttacgtgtacagattaaaaaattaggaattttcaccagaaaaatagaaaaggaatttaactttccaaaatccttataaccttttaattttttaataaaagggataacaaaattgcttttawtaataacgaataaagataaagccataaaggtggtcagttttgcagaagcgtccaatcttcacga

SEQ ID NO: 89 - DNA, 401 bp, Glycine max
acctatgtcaacaaatgcaacataaatakgagctgcattgggaatatctgttttgtaaactccataactaagaccagttgcagtgcaatcatggatcaaccgcaaaggcttcaacccaacaattgctgctgcatcgagatatgcttgtctctgcaagttggtaaagtatgacggaaccccaataacgcagtcagaaactgyggtcccaaaatccttttcagctatagtcttcaagtgagcaaagagcattgctactatttgaaccggggtaaatgcaygaatctccttcaagtatttcaagcgaatcagaatgccaccatccgggccttccgaagtttcaactgggagcarttttaaatcattctgaacatcagggtccgtaaatctcctgcctattagtc

SEQ ID NO: 90 - DNA, 401 bp, Glycine max
twtgtcaagcatgagagtcttgtctgcttcagctacctttgttagatagttgttgtttttatttcrtccactaataaaaaaaattgagttggattagaatttttttttagttcctatartttgaaagtgatatttttgtcttatartttatattttaattcttttttagttyctatagtttaaaaatgatctttttagttyttatagtttgtgttttaattctcttttagtctctatagtttgaaagtgatatttttagtttctataatttgtattttaattattttttaatccttattacagaaacatataaaaatagttagttacaaattagttataaattatcaactattttttattataagttatcttgcgataaattagttacaaattactcgcta

SEQ ID NO: 91 - DNA, 401 bp, Glycine max
cttcgtcttcaagcttcagcaatgagaaggccgaaatcgaaggagtttcgcaagcaacagcgagtttcagaggaggaagagataaacctcttgaattcatggatccagtttcagccaccggactccggttcgaacccaatgtcgctgccgcgtctccccaaaaactcccccgttggtygcctcgaagataacacctactckcgctacgccggcgcgtcacggtttgatcaatttccactctcgaagaaaaccaaggacgccctaagagagtccaagttcgtggccatgaccgacatycagagagcgtctcttccccacgctctctgtggccgcgacatcctcggcgccgccaaaactggctccggtaaaaccctcgctttcattatccctgtaagtgcttc

SEQ ID NO: 92 - DNA, 401 bp, Glycine max
gacatcctcggcgccgccaaaactggctccggtaaaaccctcgctttcattatccctgtaagtgcttcaaaaccatgagaagctgatacgtgttygggcaaggtcattggtttaatatatagtgggtgaatagatggtatattgaattktggaatttgtgcttattgttatttgcttatggtgaattttgaatgataggtsttggaaaagttgtatagagagagatggggacctgaagatggtgttggcagcatcatcatatcgcctacaagagaattggctggccagttatttgatgtgttgaargttgttggcaaacaccataattttagtgctggccttctcattggtggtcgaaaggacgttgacatggagaaagaacgtgtaaatgagctcaacat

SEQ ID NO: 93 - DNA, 401 bp, Glycine max
ttttaattcctatttttttycaactcttatwattttgatcttttaacgtttcgggaatgggtcttggattttcgttcccaaacttttttttgytctaatattttgatcatttctttgtttctaaacgggtttgatatgatgtaatatttcttttattatttttttgattaaaaattrcaaataatttgttaaagtgtatcsatcaattttatgacaatgattcatctttgtaaaaaatccagctaatcatctttagtttrttttttcctcccaatcaaatattagtgataattttatgttctsttaatcacatattatttatcaacaaggctcaaattcgataccacttacatcaataacttaataacttgtataaaagattttaaatatattcaaccttt

SEQ ID NO: 94 - DNA, 401 bp, Glycine max
ttaaacatagtctgtgcactatattgaatgccaaggaagcatcaatgaatgtatgtaacctgatcaagatatattgggtgcatggttttcaaattttcattgcttatttatcagacttggatcttgccccatacacttttgtcattagtatagttgatgcagtggaacatggtttgtcctataaggctataactagagttktttgctttagcttcgaatataagcccatgttttagaatataatgataaatataaaagatcaaaggaggaggacgtgtttgtaacaaatattattcaatygaaagtaaaattttatgacagaaattttttgatttaaaatgcttatgaatataacaggtttattaccattaagttaatgacttgcattgctcctacatagt

SEQ ID NO: 95 - DNA, 401 bp, Glycine max
aatttttacatcataattcaatcatatatcattagggaccttaatcaattttaactaaggagaaattgttttttaattaaaaataagttcaagttctctataaacaactatgttaagttaaataatagaaatgataattttatcgcctatrtatgaaagtgtatatctattamatttaagttgtaatatttwaaaaaaatkatgtcattccattcataataagaaaataaatacatttgagtatatgattaaagatataaacacgggcgtataatttatatgctcttattaacgagtgagtgacttattgtctcttacaaaattcaccaaaaaattatttagataaaaaaaaaaaaaagtraagaaatctgagaatattgttaatcyaagagcattgttgt

SEQ ID NO: 96 - DNA, 401 bp, Glycine max
ataagatgccgaatgcatcatgacaattgagaaagatacatatacttctctcataccacaccccataacattattcttgtttaatttcttatacaataaataaaatgataagagcagggatargtttgagataaaataacacaaatattcttgaacagccatgaacctttttgacatctaagagtggaagaaagaaaacakaaaaaaaagatataataaaaaatatgatgtgataaaaaaataaagaaaatagtgagtgctaatgatttttttttttttacttttatagaaatatatttgtataaataataatacaactacaggttaagtgtgtgcaagaaaacattcagactgaatcgagttataattgaaccaattttaacctatattattttttcaaa

SEQ ID NO: 97 - DNA, 401 bp, Glycine max
gataatatccaaattttgaagattttgacgtgttttttatgaaatttcagatgacatttaatttgttcaatttgcagactgcaattccaattctaataggaaccaagtttgacgattttgttagacttcccccagatgtgcaatggacaattgcaacacaggtaaatgaataaaataataataattactgctgcaaattargttttggtaacttaatttctcttaatcatagtacatggatggggctgctttacttgtcttggtcattttcacctattgactcaggaacaaagaataattcttctagtaataaataggagtcttaattgtttggaacctcagcatgygtcatttatgaaagttctgttttcgcgtttaacattawctttggggcttacatg

SEQ ID NO: 98 - DNA, 401 bp, Glycine max
atttttctctatttaatattatcwcagtttttactcatatactttgatattttaaycctgattctttatgtaaaaaagtttaatctatctattttctctcayaaattcctttacaaaaataaaarcgtaaattatattaagaataaagatgyatgaatagaagttcattytattccaagacatgatttcatttaaatgtcmtttcctagttcwttagacaawaaacactttttaatgtcttacttcatrcatgaatatatatgtgtgatcaratcacactcaataacaattaaacrcagaaaaagaacaataaaaactgacattacattaaatagataataaaaaagaactmcmaacaatgacacaagagactttacattttagggggttgatgggaatgg

SEQ ID NO: 99 - DNA, 401 bp, Glycine max
tcwcagtttttactcatatactttgatattttaaycctgattctttatgtaaaaaagtttaatctatctattttctctcayaaattcctttacaaaaataaaarcgtaaattatattaagaataaagatgyatgaatagaagttcattytattccaagacatgatttcatttaaatgtcmtttcctagttcwttagacaawaaacactttttaatgtcttacttcatrcatgaatatatatgtgtgatcaratcacactcaataacaattaaacrcagaaaaagaacaataaaaactgacattacattaaatagataataaaaaagaactmcmaacaatgacacaagagactttacattttagggggttgatgggaatggaagaagaaagggaatgggkaa

SEQ ID NO: 100 - DNA, 401 bp, Glycine max
aatagagctttgactcagtgtgtytttctcccttrtttcttattccttttataggyattagttagcttaaaattcacatgaccttgcgctaagcccgacagytrcgcttagcggtgtgacagtgatcacgcgcttargacgtgcttygcgctaagtgtgtctttagrtttctttgtggattttcttcgcgttaatcttggwctgaccactcagtgagacttygcrttggacttgtcttacgcgctaagagagatrttttaatcttcaacttcttyctygaatttttttcaagtttctacatcaatttaactttaaaacacaaaatttctcttctttaaaatcctacyagtcaagaattaaaatgacattaaaatcctcattattctattaaaaaaacaata

SEQ ID NO: 101 - DNA, 401 bp, Glycine max
caatggtgagacgctctaacataggacaactattsaggaataatgagattcgagaaaactcattatgttgcaaggccatcttcatgatcgaatgtcgtacatccatgtcaggttccatatgtagctgttcggraccagtagaaattaccttaaaatatcacacgcaatacgttagttmaaacaatttagataagatattgwaattaatccatatttcagttcattcaaacagaaatggaacaagtcaaaagagtgaaagttattatggactataagggtaattatacccttatatataattatataacttgtactaatatatgataacaattgacaaattaattatagagagaaaaggtgatgaagaatttatatctgaagcacaaaattacatagagtca

SEQ ID NO: 102 - DNA, 401 bp, Glycine max
tccaacaccttttaaaactcaaactctccmgcatgttacaattggaaagcaaggccttgatagcactgagtctcacttccatccaacccaaagaaacttctttgagtgcacsaaaattaaacactttagtctcaataaaactacatgaatgtagcktcaaagactcaaggctaaaatgagtgtatcttatgtattttcctrtcaaacatgtaataaatataagtgatttgacaaaatgaaacacccatgcctagaaatagcatataggaaaatattcaatttacactcactttcttttccatacatatctagcttttttcattttatttttatctttatttttcatcacatctatcactttatctctctcttttttctktatttctctctcttccttccac

SEQ ID NO: 103 - DNA, 401 bp, Glycine max
tctccaaaaccaacacgagaaaggtgcagtggcttttgcactgacaccaatgatcttagagagtttttttcctttgaagaaggtgaaacaagggaacatgactgaactggggttgaaggtgaacactttttacgcaggaaaagatcagaacctctgatcgatatgacgggttgtttcacggtgcaaatcatgctgtgtgaycactgatgaaacgatgaaaaaaatatttaaaaactaacgataaaatctaaactttctgacgagaaccttaatgggttgttaaataattgatgggagaatacaaaaacaagagaagaaagtagggatcccgtgcgaatgtgtcagtgtcagagccgtgatacaaactctcacggactgagcactatttttttttatgtgat

SEQ ID NO: 104 - DNA, 401 bp, Glycine max
yatgaccttaatttcgttattcatgtaatttartaattctcttacaaattttatcactaargtttaggtaacttaaatataaagtgaaatattgtattttactagatgaaccttagttraatggatgcattgaaaattrtttttgttttaactttcaagaaagctyataattggtggtcatctccactataaatagagaarataattagtrgataaacacaacacatgaataaagwgtgtgagaagagagattctaaaacaagtcatttgttgagataaaartayctttatgtgacagtgttatcatttcttataaccattgaatgaggtaatcrgatatctagayatgcactatttgaggtgagttataatcttataatcatwtttttatagttagattg

SEQ ID NO: 105 - DNA, 401 bp, Glycine max
tttgtctttataattttttatctaaatcaacctaatttatttataaactttatttttaattcgtaccawtgaattattcatttaaatttgatcttttttttagaattattatttatattatttttatttcaaatattcaatacagttaatatgatattatcaaatatctgaaaataataaaattaattcatttaacatcaycaaataacaatacataataatactttaagaagtttcaacagcgaccgctcaaacacttaaagtctgcacaaaaattaattaatattttatacaaatataaaaaataaaataagagattacacacttgacttaatctttttcgctccatttatttcaaacttrcaagtcattaatattttgcttagtatrtctaaactaat

SEQ ID NO: 106 - DNA, 401 bp, Glycine max
aaattcattcaatctatcastaacgattaaattcaaaatataagcagaacatcacatatacatgaactctcaacttattaaattattaytattttattaaaaacactaaagaaaataatgcatttccacaccttccttrattgtcaagttattttttttagtttttaatatatatataataaattttatattttaattackagttcagattgcttataaagtatgaatggcgcagctaggtaagttgcgcgcggcatgaattgaagagtgaaaggaagatgagggtggcrgaggaggagaaagcagtgttggaacaagtgttcgggtcgtcatcatcagaagaatgtgattctgatggatacagcgagagcgagagcgagtgggagcccatctcagaagtg

SEQ ID NO: 107 - DNA, 401 bp, Glycine max
tagatgtagactttcttatttcataactatttctaaaaggtaaaaatagtttttatagctttttgaaaataaatatttttaaaggaaaatgttttttggacacctaataataatatgctacccaatatatagggagagaaaaaaagagaaaaataatataagtatgataagatttatgatgccataaaaagatagagatgragataaattgagrtgttgatagagtgtttaaaattatgagtaattcatgtatcacaactcatttttttagggtaaatgatgaatttggtctttgtactttacactaactgtcaatttagtttttgtactatggaaataatcaatttagtctataattatgtaaatataycgacaawttagtcctactatcaactctcctt

SEQ ID NO: 108 - DNA, 401 bp, Glycine max
gatgaatttggtctttgtactttacactaactgtcaatttagtttttgtactatggaaataatcaatttagtctataattatgtaaatataycgacaawttagtcctactatcaactctccttcgtatctattaacgtttttggcaatatggcacatgaaatatgacatgataaatccatgtgttggaagtgaaagccacrtgttggactaggtatgtgtggaccaaattgtcaattggagtatgtgtgtgtttttaccttttattaattcaccatttatcctcttcctttttacattttgtgagaaagatgttgaattgtgggtgctaagtttgctttgctctttcctgcctttgcatcatcggtgyctgtgacgacttaacgacagatggtggtgtttg

SEQ ID NO: 109 - DNA, 401 bp, Glycine max
gtatgaaaaggaataaattttattattgatacaaagatgctttgtttcctcctttttttactctattttgtgtgwttccttttatagaatgtttgataagattaaccttttgttgcactacaaaggtcratttgtctgaaatatgacaaaarggtgttggagtatgtatgcggagggtgaagaatgttaatgggactttgragactaacctgatgtatgtttttttattgtccatgatacatgcaagtttttaaattcaaattattgttatagaccatgttgtcataaagttatatttgatggggaacattttgtcgttctagaagaaaattttatcatgaaattaggaagaagagccttttatttttaaaatagtcattacctttataaatttwaaaatc

SEQ ID NO: 110 - DNA, 401 bp, Glycine max
taaacaacaagcatcatttttttttcatgtatgagtttattcattctttctcatgtcttaccttttwtttcaatgaataaaattaggtggtgataatagctaaataattatacttttataatagaaaatgaaaagaaattgtttttaaaataattattaagcagttatttgcgcttaaatgttaaagaattgatatttagywgaattgtgactacaaatataaaaattggaggtgttataagcaaaaaagtraaaaataatgaagaaatcagaaatggctcagtccagcgtgcagctcgtgctaagcgagacaggagacacaggcgctaagcgagacgttaaatacgaaagttgatactcgcacccagcragcaacacgcrccaagtgaacaaaaagcaga

SEQ ID NO: 111 - DNA, 401 bp, Glycine max
aaacaacaagcatcatttttttttcatgtatgagtttattcattctttctcatgtcttaccttttwtttcaatgaataaaattaggtggtgataatagctaaataattatacttttataatagaaaatgaaaagaaattgtttttaaaataattattaagcagttatttgcgcttaaatgttaaagaattgatatttagywgaattgtgactacaaatataaaaattggaggtgttataagcaaaaaagtraaaaataatgaagaaatcagaaatggctcagtccagcgtgcagctcgtgctaagcgagacaggagacacaggcgctaagcgagacgttaaatacgaaagttgatactcgcacccagcragcaacacgcrccaagtgaacaaaaagcagaa

SEQ ID NO: 112 - DNA, 401 bp, Glycine max
catgtcttaccttttwtttcaatgaataaaattaggtggtgataatagctaaataattatacttttataatagaaaatgaaaagaaattgtttttaaaataattattaagcagttatttgcgcttaaatgttaaagaattgatatttagywgaattgtgactacaaatataaaaattggaggtgttataagcaaaaaagtraaaaataatgaagaaatcagaaatggctcagtccagcgtgcagctcgtgctaagcgagacaggagacacaggcgctaagcgagacgttaaatacgaaagttgatactcgcacccagcragcaacacgcrccaagtgaacaaaaagcagaacacgctaagcgagaatcacatgctaagcgcgcgatccaacataagtagca

SEQ ID NO: 113 - DNA, 401 bp, Glycine max
ctaacttgagtcacgwtatatatttgtctaaattatattcttaattatgttattagttctaagtatacctttaattagacttaaagacattttgataattacatactcaaaatcaatcttaattagtagtacaagttttcaaacaaaacattgtgtattaaagtctctttttaaatatcttttatccaaaaaaaataaatmatatcactgtaaatttttccttagaatcaattttagaaaattattatatgaatacatattcaagcatacatttgagtgttaagaaagtctagttcacttaatcaaataaggatgtgagttattattataaatttcttaacaytgtctttaattcttacagataaaaaaatatacacttaarcaatgaatgtttttatctt

SEQ ID NO: 114 - DNA, 401 bp, Glycine max
cagaatctttgtttcatgtaagtacacgagcgtgggaatataacaccatagatcatactacaaatctaacattagcatacaatatacaatatacattatacattatacgccccttttaactatactatcatttaaatacatacatcgcttaaccttcggcgcagcagccaccagcaaggcaacacacacaagtcgcaatarcttaattatctttttttttwwaaaaaaawatgaaaataacatgcatggaaagaaacgaataaagcgcaagagttgattagcaataataaaataattaatcaacgaaaatcaattgcagtaccaagcaccaacattaacattataataaagcatgagtgttaattaaataattgtacgagtttaattaataattaataaaa

SEQ ID NO: 115 - DNA, 401 bp, Glycine max
tttaatattgattggtgattagtgatcttaagtgcacatagtattataagtgcatttgataatattattatctccgctgataaaaaaaaagtacatttatactattctcctattaaaatagacttttatttcactaacatatattaacctttaaacctttaattaaagtcaatttttattgcatagattattaagataaarctttaattttattgaagaataatgytaaaagcatttataaagctacacctaaatattatccttaataaataaaataacctattagcgatataggatttaggggttaattagggaaacattaaaattaaaggtatctttctatagtttataggtatttttcattggagataattttatttgacttaaatattttccattga

SEQ ID NO: 116 - DNA, 401 bp, Glycine max
tcttaagtgcacatagtattataagtgcatttgataatattattatctccgctgataaaaaaaaagtacatttatactattctcctattaaaatagacttttatttcactaacatatattaacctttaaacctttaattaaagtcaatttttattgcatagattattaagataaarctttaattttattgaagaataatgytaaaagcatttataaagctacacctaaatattatccttaataaataaaataacctattagcgatataggatttaggggttaattagggaaacattaaaattaaaggtatctttctatagtttataggtatttttcattggagataattttatttgacttaaatattttccattgaattattatagagagtatatagccat

SEQ ID NO: 117 - DNA, 401 bp, Glycine max
gtttttaatttaaaaaataaaatagaaatagttttttgggcaaactgattcaaacttggatgattcgtccagttttggayaagttcaattggttttataccagttttttttgtaagactggtttctagagttaaatgaactgrtttgattattaatttctggttcaaccagtgcatgcyaattggttggtttggttcaatwctaatactaatattaatctgamttattaataatttttgcgcgcgtgtgaaatctwaattacttrtagttcgawgccaactgagaaaacataatcctgtttcatcattaaccaaatttataaacttcaacgactgtatgctagatcttagttttttttttttattctgctacaacgactgtaggtttctacaccgakattt

SEQ ID NO: 118 - DNA, 401 bp, Glycine max
atcaaaaagaaaataaagaaaaaaaaaaagagaagaaaagaaaacatgaataaaaaactcaccagcttggtgtaacttatcaatttccctcagtttcttttcttccactttttatggcttattcttggacttaaaatatatgtataaagtaagaaaataaagatrtatttaatgttgatttttaaagtgggctaaatttartgtgataatttatttcaaatttggatgttggaaatttttaastttttcactttacatggatcctcaccttagagtagtttgttagctacatattattgacggttatcactgttttgtaccaagtctagcacataaattgcaataaatatatgatatttatctgaaaattctgtytattttttaaatactactcacatttt

SEQ ID NO: 119 - DNA, 401 bp, Glycine max
tcgagcatcgattttgaatttttatattacaaatttgtttamgtatactctgtttactaaattttttasaagtatttatagcaactcctttcatggaattataacagattgtttagcaatagagttgcccatgaattagcatctttagcttttgatttgcatgagaaatacttcccttcctagtggaacattttgtgtctrctaagtgtgtgtgtgtttgaatttccggtggagggtctaaaagtatgtttaagagaaaaatgaatttaaaattatatttagtaagtctccaaaaatatatttgagactaaaattttgtcttgaaactcagttgtggaaaaataatatttgagatgtttttacaaacytaagtttaacctaaacttaaattttcaaatttt

SEQ ID NO: 120 - DNA, 401 bp, Glycine max
atacttcccttcctagtggaacattttgtgtctrctaagtgtgtgtgtgtttgaatttccggtggagggtctaaaagtatgtttaagagaaaaatgaatttaaaattatatttagtaagtctccaaaaatatatttgagactaaaattttgtcttgaaactcagttgtggaaaaataatatttgagatgtttttacaaacytaagtttaacctaaacttaaattttcaaattttaatccaaacatrcataaatcattttgtgtctactaccgaataacatctagtttttcaccctcaaaagagaaaaaaaaaacttcaaaaataaaggtgcataaattaattttaatttatggagaagtttaattaatatattttacttattwtttttctataaatgttta

SEQ ID NO: 121 - DNA, 401 bp, Glycine max
aaaataartttgataaaaraattatttccatcaatgatcgarttcaagtactacccaaaygatttaaccwtaaytttagcatattaatcacaaatattcaatcacttcattargtgatatargatattttcatatagctgtattttagaaaattattcatctcsaattcatttttatataggtagcaattctagtatccawtattcttatactttatgtataggtagacactcattttcaaattcattatccacattttaattaaataagagtgttattttatattctaattatgaaacataataagcaaaatatttaactaaatttaaatcmagcataccagtggattcaagtccgaaaaaatgtagaagaaaggtgttttctgtttttgcataaattta

SEQ ID NO: 122 - DNA, 401 bp, Glycine max
ccgccatgtaaacacaccatagtgggcttctcttcacaaattgcctatggtggttggcaaaaaatctgccatgccattccaccatggcggccatgacacctcctttaacaacattgtatcgtagaattcattttcaaatcaggagacctctctacaggattggaagaaggacttttcacccaactagttagagttcctccraaccgtgycattctygaagtgtgatatgacactgtcaaaaacacgaggttggaatgtgttgaagaatactatacaaatttaatacatttttattccctacttttttttctcaaaaacatgtgtttttagttcttgacaagagactaaaaccacttcacttttaataaatgtaagaactaaaacatgttgaatttttatag

SEQ ID NO: 123 - DNA, 401 bp, Glycine max
taaacacaccatagtgggcttctcttcacaaattgcctatggtggttggcaaaaaatctgccatgccattccaccatggcggccatgacacctcctttaacaacattgtatcgtagaattcattttcaaatcaggagacctctctacaggattggaagaaggacttttcacccaactagttagagttcctccraaccgtgycattctygaagtgtgatatgacactgtcaaaaacacgaggttggaatgtgttgaagaatactatacaaatttaatacatttttattccctacttttttttctcaaaaacatgtgtttttagttcttgacaagagactaaaaccacttcacttttaataaatgtaagaactaaaacatgttgaatttttatagggactaag

SEQ ID NO: 124 - DNA, 401 bp, Glycine max
accatagtgggcttctcttcacaaattgcctatggtggttggcaaaaaatctgccatgccattccaccatggcggccatgacacctcctttaacaacattgtatcgtagaattcattttcaaatcaggagacctctctacaggattggaagaaggacttttcacccaactagttagagttcctccraaccgtgycattctygaagtgtgatatgacactgtcaaaaacacgaggttggaatgtgttgaagaatactatacaaatttaatacatttttattccctacttttttttctcaaaaacatgtgtttttagttcttgacaagagactaaaaccacttcacttttaataaatgtaagaactaaaacatgttgaatttttatagggactaagaccaaat

SEQ ID NO: 125 - DNA, 401 bp, Glycine max
ttcgaatctggaaacagcctctttgcatatgcaagggtaaggctgcgtacaacatctctcccccataccttcgcatagcgaagagcctctgggcaatggggtacgaagtttttttatatagttgggctatgtgtcttgtctgccagtaggaacgtatattttaactctgcaataatacaaagggaagtcagtttgttttawcttrcatgatgtgatttttttaaatcttctcaatttaatttcgatatcatctcgaatggcctctctcaattatttctgctacttagtatcattgcaatttatgatatgcccatgatgctaatatatcatggctacacttyctcaggaaacggagttacactgacacttctaacttcactctgcgctgtggagtatgccaa

SEQ ID NO: 126 - DNA, 401 bp, Glycine max
aatctggaaacagcctctttgcatatgcaagggtaaggctgcgtacaacatctctcccccataccttcgcatagcgaagagcctctgggcaatggggtacgaagtttttttatatagttgggctatgtgtcttgtctgccagtaggaacgtatattttaactctgcaataatacaaagggaagtcagtttgttttawcttrcatgatgtgatttttttaaatcttctcaatttaatttcgatatcatctcgaatggcctctctcaattatttctgctacttagtatcattgcaatttatgatatgcccatgatgctaatatatcatggctacacttyctcaggaaacggagttacactgacacttctaacttcactctgcgctgtggagtatgccaaattg

SEQ ID NO: 127 - DNA, 401 bp, Glycine max
tgatatgcccatgatgctaatatatcatggctacacttyctcaggaaacggagttacactgacacttctaacttcactctgcgctgtggagtatgccaaattggagtaatgggtcagaaggtgattcctcagtacccgatgctttgctttatgctacttacccaccttagcctattctcctttgttcttatgattctgagwacttgtttttttgtgaacatttcaggaggcagtggagcatgcacaagcaactggtcatgttaacttccaagagtatagatgatgcactctgttcgtttgaatgagatacaaattcatgtgtaatctccgttgatttgaatgagcatcattgatgaaaggtagttgctttgttgcagaccataaaactgaataatttctgc

SEQ ID NO: 128 - DNA, 401 bp, Glycine max
tgaaaggtagttgctttgttgcagaccataaaactgaataatttctgcatgagaattgytgtggcaayttgggttgtaatattagttccttggtctcgttccacaratgactgtsattataagaaactcacctctagtggcagactagataaagaaactaattagtaatcaattgttttttatattcttttcctggtaaakatttttatctaatatatttcacttattttcctkttataatttttagtgtaataactacgtraactcgcgccactattttaaccttggcgattgttgaatgcttttgataytatatataaatcccttttaatgatagtatataatgactctcaaaacaaatttacaratacttgttctagccgtcaagcttattgttaatc

SEQ ID NO: 129 - DNA, 401 bp, Glycine max
taacccttggcccaatcctatggttataagaaattttgwtgtgattccactgtgtaattgtgttctcatcctagtcttgacttcctcatatatatcattgaytgcttgaagatgtgcaacacaaatttctttcttcttaaggccatccacaatatctttcttagtatttgatcatatgccttttctaactctaaagaacawatgaaaatcttttttattccaaaaatcttttgtcttcattaaatgctatagcaattatattgcttccatagtttrcctcctaggcataaatctaaattgtttttagtaatatgagtttttttgttcttaatcttccctcaatcayctttttctcataacttcatcttggtcgccaataatttgyataatcttttttatat

SEQ ID NO: 130 - DNA, 401 bp, Glycine max
cttgacttcctcatatatatcattgaytgcttgaagatgtgcaacacaaatttctttcttcttaaggccatccacaatatctttcttagtatttgatcatatgccttttctaactctaaagaacawatgaaaatcttttttattccaaaaatcttttgtcttcattaaatgctatagcaattatattgcttccatagtttrcctcctaggcataaatctaaattgtttttagtaatatgagtttttttgttcttaatcttccctcaatcayctttttctcataacttcatcttggtcgccaataatttgyataatcttttttatataaatattcttacaaataggtgttagagtatcaatgcttcactcttctagcattttcttgggcctcatactcataa

SEQ ID NO: 131 - DNA, 401 bp, Glycine max
tccacaatatctttcttagtatttgatcatatgccttttctaactctaaagaacawatgaaaatcttttttattccaaaaatcttttgtcttcattaaatgctatagcaattatattgcttccatagtttrcctcctaggcataaatctaaattgtttttagtaatatgagtttttttgttcttaatcttccctcaatcayctttttctcataacttcatcttggtcgccaataatttgyataatcttttttatataaatattcttacaaataggtgttagagtatcaatgcttcactcttctagcattttcttgggcctcatactcataaccwtgttaaacaatttatttattttttattagaaatgtgccaatagaaatcttacaataaaaggcataat

SEQ ID NO: 132 - DNA, 401 bp, Glycine max
tttttgttttaataaaaattactcgagggcttccgtttaacgttacttcatacaatatttcaaaartaatgagtcagcttttaggagcmaaaaatggtaaacatagtcaaagtcgattagccataaatgagaaattaaaaaaaaattatttgtaattttttcatccttttcgaagatcttaccaagccttaaaaaaacaamtatccctaacttcaatgctgctattatagagactaaaaaactactaacaaattgtgaaagctaatctcagaaccattcattcacgccactccayacaagttgaagaatgaaagtggtggccaccctggacacaatatgtatggtggagcagaaaaatatgtagtgcggtgcccatgttacagaatctcatcacatttctc

SEQ ID NO: 133 - DNA, 401 bp, Glycine max
cacttttttactttatacatcatctctctaaaatcgtgaaaaaataatacatgaacgatatttcatgacgtgtcacccttagatgcactatttttttgtaatattctaggcgttaacattccaacacgaaaggtaagggggtttaatatggctttgattgcgaaatgatgtccctaccctttacactttaaagggtcgtgrtaagttgggaaggggcttttaagtcttttcgcgattggtgccagcgtagagagagaaagcatgattgttcagctmcaagactcgctctttttgcagtgatcaaatcctcatcttctttctcaatcctcaaccagtaacctttcaatttctctctcttctgctctcactctctcacttggggtacgtatgttgtgttcttc

SEQ ID NO: 134 - DNA, 401 bp, Glycine max
ttcattctccaattgcacgttttctttcatttctcaattcaatttctctcatttccctcttccttttaatctgtgaggaaaagggaattgtggtttctctttatttcagttcaatttttcttcttagtgtaaaaaaattacctttattattatgtggagattgattcctgtaatttgttgaagggttgaagatgagaattkgtggagcaggtatgggttgatattggatttcctttaatttatttggtggacttatttccttcatgtttatgcacccaattctattaacaattctgggtcatgtgagtttggttttatttttatgttattctgtcgcaattcccaatttatgaatagcatygggtgcacactgggccagctgtttgcatgagaaaatataa

SEQ ID NO: 135 - DNA, 401 bp, Glycine max
ttgattcctgtaatttgttgaagggttgaagatgagaattkgtggagcaggtatgggttgatattggatttcctttaatttatttggtggacttatttccttcatgtttatgcacccaattctattaacaattctgggtcatgtgagtttggttttatttttatgttattctgtcgcaattcccaatttatgaatagcatygggtgcacactgggccagctgtttgcatgagaaaatataaatttatttattggcacaatctttgacccaatacggatatccatttgttggaaattctatgaaattggaatcttatactatactaattgtcttctttttcttcccccaagtgagtgctaatarttaaaccataaatcacttctatatttcataacaaggac

SEQ ID NO: 136 - DNA, 401 bp, Glycine max
tgcatgagaaaatataaatttatttattggcacaatctttgacccaatacggatatccatttgttggaaattctatgaaattggaatcttatactatactaattgtcttctttttcttcccccaagtgagtgctaatarttaaaccataaatcacttctatatttcataacaaggacttgtttttctctatttctgtctgrttgcatacatgcatgaaagaaagagtatcarctaattgttttatttgaagaaaaaatagtggcgtgcttaagtgttaaattagtgttcaatagtaggcacagttgtatgwgagtctgcarcttgtaaagttgtagtccatgtttgggggagaaaatacatatactataagaaaaaatatccaaaagttagagggagraat

SEQ ID NO: 137 - DNA, 401 bp, Glycine max
ttgtagtccatgtttgggggagaaaatacatatactataagaaaaaatatccaaaagttagagggagraatatatgtgattaagactagaacataaagtgatgtgatgggatgggagtttaagttattttgaaacctaatcatctttataaaatttaggacgtgtttggyttcagaaaatatgtattcaatttttattttyataaataaatataaaaatcttatcttgcatttactttgtttactattttccatgttcyacaaattattttggttggtcctagcacaaatccttgacaatagggaacaaagtaagcataagatgatatttttgtaattatatgtgagaattcaaaatgaaaacagagaataattattttattagttcagatgatccttgat

SEQ ID NO: 138 - DNA, 401 bp, Glycine max
ttcctcttgtcaacaaaaatcctctctttaaaacatctcttcttatgagcactgttttcaaaagaacctgcaatgagcccgagctcctatgattatcattgatccaatatcttaacatttgatggattgtctcctttctttgtacattctgtaactccatttatcagttgcatttaggagttcattgcaatgatggttttrctttaatttcagtgtggtaatgtactagttccaacttcttatgttggayttcaattatgtatggctctccagaatggcttgtgagcatcyaaaaataagttttcatatggagtaatctatttcagtatttcctttgctacatttttttcttgtccstttgtttcttttgttctcccctttcaatatgcatacttaakaca

SEQ ID NO: 139 - DNA, 401 bp, Glycine max
aaaataatcttctatcaaagggaaaaaaattcattaaaggaatattactgytaatttcatatatttattgaaacgaatcaaactaaatcaaacaacaaaataatcatttagaaaataatagcattcatagtaagtaataaatatatgcatcttaaaatctatgcaacaaacatttttttttttctgaggaagttcaacccwgctcataatttagaacgaaaattaaattacacmtagtactccaaatagaaaagtcgaaaataaaatggtaaagaaccacttataaattaaatttggacccatgatggtaatggcccgcatgagcgaagaggcaagtaaaacctcatcacacattctgtgaatgtatcctttttctttctgcccatgtatygggttgccac

SEQ ID NO: 140 - DNA, 401 bp, Glycine max
ttgaagtggaagatccatgacgatccactygaagacgaccagaagtcttccgtcgctgggtcccgccggagaacgtgccggrgcgccaagaagcaagccgaagtcgctgtgtcggcgaggagactcgccgccgggctgttrcggttgcatctaccggagacggccacgggtgatggccggaaggggttggaacataaggtrggtaacttgggctactcttcttacactctgggtctgggcctaactcagtcgcaaaaactcgtttttgctgtgagggttttcctctgcttatatacacttttgtctatgacactggtcaatttgggatctcaaacgtttacccttttgtttttttctttctttctgttgtttgagatccctagtttttcttcgttcccgtg

SEQ ID NO: 141 - DNA, 401 bp, Glycine max
gaatcagttgcttccgttcgtgcttcattaaatcatatccatccagattgcattaaatattccgtcttgtttggcagaatgtcaaacaaacatgctgtgtagtaatattggcttgtatgaactcattcttttgtgcttttttgaaagtaagttgggactttagttgggtcttccttttatatgagattctgttatttgttrtctgtacatttattattgtcttygtttgtagatcaatgtagctggtttacaatattaatttcatagrtttccatttckcattactgatcactgatgtcacttatctgcagcatggaattggtcacccagggctccagtttcttggtcatcctaatggcatgacccatggttctgatctgaagaagaattcatctcaaagt

SEQ ID NO: 142 - DNA, 401 bp, Glycine max
gacacttctgtgaggtatgatttttcttactacttcaatatcaatataatataaccattagaagttttacagctcttcggtattgtaattgargattattgactgaatgtcatatacacgtaataactcaagttaaaactgcaacctgtactgcacaatgatctccaatatcccattgctcagttatgccattacctgttytaatcatctttgtgaaaatgacatcaatcatctaatcattaagttatagatagtgayaaactataatcatagcaacacgttgtttatgatttcatattatggaaatttttagtaatatttcaaaggcctgcccgtgcaaagacacatgcatattatatgggttgataccacccaaattgaactttgaaacaaattatgct

SEQ ID NO: 143 - DNA, 401 bp, Glycine max
tcagaataaaaaagaactttattgtaaatgaaagaaacttccagaactaaaaatgaaaaaaacttaagaacttacacttgattcaacaaagtccgtgaggaatcttggtcgccatcgcgcacccgcgaaccagaaatttcaattccctccattttcccctcaaattcaaatcccctaaastctcccttatatacattacamacacacacctcaattcaatttccatggcgaacttygaagtgccctcattttccctaggcytcgacgatacgcccccccattccccaatccatccacctctttctcccgatcttcacgtctccgactccgactccgactccgatcccgaatcccgacccgacccgcctcgccccctcctcaaacgcctccgccgcgggccc

SEQ ID NO: 144 - DNA, 401 bp, Glycine max
aatgatagcatattttaagtaaatgaagacatcgagagggccttttcttgggccttttcttccgtctatcttgagctgaggatacgagatgcttcgcctgwattatttgggctctttttgttgatttttattggctccatttgttgatgtttaatgcacatgtaccaaataaatactgaagtttgcagacgatgtaaactwaaattaggacatcatatttgtgagcggaaacttaaatcaggasrtacgtgagattagcttacgtgtacagattaaaaaattaggaattttcaccagaaaaatagaaaaggaatttaactttccaaaatccttataaccttttaattttttaataaaagggataacaaaattgcttttawtaataacgaataaagataaag

SEQ ID NO: 145 - DNA, 401 bp, Glycine max
aatcttcacgattttattccatccaaaatgatagattgaatacaatttggaattaaattgaaaacttgttgacgagcataaaatctagaaacccttgacaaacaataaactacttgattggcttgtctacgtactaactaattggatggctttagtagaacgtggggccaaaaataaaataaaaaaagcagattgaaccgrtaattaccaatgatttcccttatttgaatttwtctctttcaactccccggaagggggaaaagtgttaaaaaaaaagttcacatttgtcagaagctattaaaaatttaggccttcagttcattcatcgtcttcattgatgattagaagtattctgcttgtcttcrcccttgtcttttggaaatggagaacccttggatttc

SEQ ID NO: 146 - DNA, 401 bp, Glycine max
ttgtcttttggaaatggagaacccttggatttcaatatctgttggcatastctgaaaacccatcaaaatagaacattcattagttttgagataaaatcaatgtatataatgacaatcaagttaaattggagcaaaygaacaatgctttgcttcagaaaggggtataattctgacccaaataaatgatcatagtaccctacwgttatgcatctctgaaaaggaaaacagaaagttaaaatcatacgagtttaaatcttctgtcttgctcttgatatcacttgacaataatactggatcaaagttcttagggtaaagatcttgctgttgcctcatctctcttagccactgctctgctttattgcactcattgatgatctgaaaaagaaagttgtcacttaaaa

SEQ ID NO: 147 - DNA, 401 bp, Glycine max
aaatttaaggctctagtttttgaagaaggaacacctcacagtaaagatatgaaaaagaagaaaaaaaggatcaygcaatgaacaattatctattttagcagatgagatgtgtgaccgcttatacaatttaattgaatcagagaagccagtkatgtctacatctcattaagatattgaacatgtaccttactcctcgtttcrtaaatataagactccaacgaattcttcctgtctttggtcagctcaattgttctgtcctgatcagctaactggagttctttttcttgagcttccaatatctcagccttggtcattccaccataaatgttttcactcacaggtacatgaagccttctgttagctttatctttttttgtaccatcagcctgtaacaaggcatg

SEQ ID NO: 148 - DNA, 401 bp, Glycine max
ctaccatattttctacaacagatggtgcctaactttctaacgcaatcattcctaattctaccttgtgtgtctacttatccatcataacattcttgagttggcaattttgagctttattccttgttgaggttttaccactcaacagtgaacttcaaacaacattgcaggtcttggatttgactcctctaaagtgagggaatrcattctaaagaataaagtgcatttataaccattgaataaaaaatcaacggttgaaactatgataaaatacaagcacatgtataacaagtagtagctttatacataactgagtcctagacttgcaattcaaaagtaaaagctgcaattatgatgaygattaccctatagtatatactatttttttactgtagaattaaaaa

SEQ ID NO: 149 - DNA, 401 bp, Glycine max
ccctgccattagaatacacgtcaatgctatactgttccttaaatcttgctgcaaaatgactaaacagaacctcatcaaagtctctcccccctaagctactgtcaaaagcatgtgaaagtatcttcatttgaccagcctgaaatgctgcaatagagacctgagtatcacaatgacctatgtcaacaaatgcaacataaatakgagctgcattgggaatatctgttttgtaaactccataactaagaccagttgcagtgcaatcatggatcaaccgcaaaggcttcaacccaacaattgctgctgcatcgagatatgcttgtctctgcaagttggtaaagtatgacggaaccccaataacgcagtcagaaactgyggtcccaaaatccttttcagctatagtc

SEQ ID NO: 150 - DNA, 401 bp, Glycine max
ctattaaattttaacatcagtttttcatctcctaaccaataatccttccaaaagtttaccacatggccatctccaacacaaggtaccacttgygaatcaaatcatcttgtttcctcattatgtccacataccctccccaaatcattccagcaagtggattgtttagaaagagttctacttgatcctaaattttgccatccytcatattttgttctaatgacttcataacacaacccttccccctcattaagcatactccactttcacttygctagtaagggctcattaaatacggagatattcttaatccctaagccacctttctgttttggaaggcaaacagttcccattttcccaggcaatyttcctattcctccttccaaacctacccatagaaagtt

SEQ ID NO: 151 - DNA, 401 bp, Glycine max
ggctaaacatgaaattgcttcttcatctctwtgtcaagcatgagagtcttgtctgcttcagctacctttgttagatagttgttgtttttatttcrtccactaataaaaaaaattgagttggattagaatttttttttagttcctatartttgaaagtgatatttttgtcttatartttatattttaattcttttttagttyctatagtttaaaaatgatctttttagttyttatagtttgtgttttaattctcttttagtctctatagtttgaaagtgatatttttagtttctataatttgtattttaattattttttaatccttattacagaaacatataaaaatagttagttacaaattagttataaattatcaactattttttattataagttatctt

SEQ ID NO: 152 - DNA, 401 bp, Glycine max
taaattagttacaaattactcgctaatatttttgtcgttaattgtaattgataatattactcatattttgatgrtaaggactaaaaaataattaagatataaagtataggrgctaaaaagaatactttcaaactatagagactaaaaaagaattaaaatacaaattatcaggactaaaaaaatcactttcaaattataaaraataaaagagaattaaaatataaactatagggactaaaaaaataamtttaaaattataagaactraaatgtacaaataattaaactataargaccaaataaataattaaatcattttttctawgaaggaacaaaaatatgagagataatcacaagagtatrgaggaaaacaaaaaaaagtgttaaaaaataatggcaatg

SEQ ID NO: 153 - DNA, 401 bp, Glycine max
ttcatcttcatcttcaccttcaccttcgtcttcaagcttcagcaatgagaaggccgaaatcgaaggagtttcgcaagcaacagcgagtttcagaggaggaagagataaacctcttgaattcatggatccagtttcagccaccggactccggttcgaacccaatgtcgctgccgcgtctccccaaaaactcccccgttggtygcctcgaagataacacctactckcgctacgccggcgcgtcacggtttgatcaatttccactctcgaagaaaaccaaggacgccctaagagagtccaagttcgtggccatgaccgacatycagagagcgtctcttccccacgctctctgtggccgcgacatcctcggcgccgccaaaactggctccggtaaaaccctcgct

SEQ ID NO: 154 - DNA, 401 bp, Glycine max
tcaatttccactctcgaagaaaaccaaggacgccctaagagagtccaagttcgtggccatgaccgacatycagagagcgtctcttccccacgctctctgtggccgcgacatcctcggcgccgccaaaactggctccggtaaaaccctcgctttcattatccctgtaagtgcttcaaaaccatgagaagctgatacgtgttygggcaaggtcattggtttaatatatagtgggtgaatagatggtatattgaattktggaatttgtgcttattgttatttgcttatggtgaattttgaatgataggtsttggaaaagttgtatagagagagatggggacctgaagatggtgttggcagcatcatcatatcgcctacaagagaattggctggccagttatttg

SEQ ID NO: 155 - DNA, 401 bp, Glycine max
ggccatgaccgacatycagagagcgtctcttccccacgctctctgtggccgcgacatcctcggcgccgccaaaactggctccggtaaaaccctcgctttcattatccctgtaagtgcttcaaaaccatgagaagctgatacgtgttygggcaaggtcattggtttaatatatagtgggtgaatagatggtatattgaattktggaatttgtgcttattgttatttgcttatggtgaattttgaatgataggtsttggaaaagttgtatagagagagatggggacctgaagatggtgttggcagcatcatcatatcgcctacaagagaattggctggccagttatttgatgtgttgaargttgttggcaaacaccataattttagtgctggccttctcattg

SEQ ID NO: 156 - DNA, 401 bp, Glycine max
ttaaattaagggtttagattaaatacttaattacaaatcttgtcattgataaaaaaattgcaaattttgtatttttttttttataaaaatggagatgatagtaatgaaatgactggtgaatggtgggggttgattagaaaatggataagaaaacaaagactccatccatccatctggtccggtcaacccatgttcatgtaytttatttcagcttgagagcgaggtggggcagcatggtaattaagcaaaaccgcgtagggcattgcccattaggaggagtcagccagacaagcaagccaccctctgctaccgcttctcatccatcatgtcgaatgaactaaaaaactatgatgtttttctcaattttcatggcaaagattccggttacaccttcactggta

SEQ ID NO: 157 - DNA, 401 bp, Glycine max
ggtcttggattttcgttcccaaacttttttttgytctaatattttgatcatttctttgtttctaaacgggtttgatatgatgtaatatttcttttattatttttttgattaaaaattrcaaataatttgttaaagtgtatcsatcaattttatgacaatgattcatctttgtaaaaaatccagctaatcatctttagtttrttttttcctcccaatcaaatattagtgataattttatgttctsttaatcacatattatttatcaacaaggctcaaattcgataccacttacatcaataacttaataacttgtataaaagattttaaatatattcaacctttaaaaaaaatacttatataactagtgttgtgttcaaaactataaatgcatgagatgtcat

SEQ ID NO: 158 - DNA, 401 bp, Glycine max
ttgatcatttctttgtttctaaacgggtttgatatgatgtaatatttcttttattatttttttgattaaaaattrcaaataatttgttaaagtgtatcsatcaattttatgacaatgattcatctttgtaaaaaatccagctaatcatctttagtttrttttttcctcccaatcaaatattagtgataattttatgttctsttaatcacatattatttatcaacaaggctcaaattcgataccacttacatcaataacttaataacttgtataaaagattttaaatatattcaacctttaaaaaaaatacttatataactagtgttgtgttcaaaactataaatgcatgagatgtcatcttgagttatgattgttatatttttttatattaattatattta

SEQ ID NO: 159 - DNA, 401 bp, Glycine max
ttattacttaaaaaaaaataagcacaaagtgtcacttaggataacaccttatcttaggtgataacccataacatataaataattttaaaactactctatttagtttttttttaaaacctacttttctaaaagagttttcttgagtaaatttacatgtgagtatcttaaaaataatatggrattttgtgatcactataaatkattttatatatttgatgatattcaaattgagttttttaaggatcttcgattagatacgtccttrgaccaaataggtgtcattgtaacttattaagatttaataaaaaaactttttttataaaatgaattttcttaaaaaaatctaaaacaaaagtttaaaaaaatgagactgtagattctgggaatgattcttaaggagc

SEQ ID NO: 160 - DNA, 401 bp, Glycine max
aattgagttttttaaggatcttcgattagatacgtccttrgaccaaataggtgtcattgtaacttattaagatttaataaaaaaactttttttataaaatgaattttcttaaaaaaatctaaaacaaaagtttaaaaaaatgagactgtagattctgggaatgattcttaaggagcaggtggagggtttggtgggtgttamtatttgacttgtgcattccacacgctgcttccgattsaaggcatctaaggagagaaaaatgcacgatttctgcttcacgatcccctacggattgatgttagtgggtggtggactgttcgcctacataagcaaagggagcatcgcttctctcgccggaggcgccggctccggtttgcttctcatcgtcgccggctatctca

SEQ ID NO: 161 - DNA, 401 bp, Glycine max
ataggattctagaaatgttagtttttttaagggaagaaaatataaatattaatgaaattatcaagaaatgactatgaaayatggtagttaaattgagattcaaatcgtaaacaggaaggcctattttccagatggcaaattgaactgtatgattaataataaaacataacacatacaactaaaaaagacataaaagcacarattcattaaacaaaayataaatataggagcattttaacataaggaaacatatcaaaagctaaaacatactcttagaatctttaggatgtgaattcaggcctarcttaacctcaaaagttaactcaatgggtgaggattatccctcacttatatactgtaactctttagccgatgtgagacttgggtttttttcaatacac

SEQ ID NO: 162 - DNA, 401 bp, Glycine max
taaaataaaaatattattagtaataataaatttttacatcataattcaatcatatatcattagggaccttaatcaattttaactaaggagaaattgttttttaattaaaaataagttcaagttctctataaacaactatgttaagttaaataatagaaatgataattttatcgcctatrtatgaaagtgtatatctattamatttaagttgtaatatttwaaaaaaatkatgtcattccattcataataagaaaataaatacatttgagtatatgattaaagatataaacacgggcgtataatttatatgctcttattaacgagtgagtgacttattgtctcttacaaaattcaccaaaaaattatttagataaaaaaaaaaaaaagtraagaaatctgag

SEQ ID NO: 163 - DNA, 401 bp, Glycine max
caaaggaggctgaggttgcatgttgatgtcctttgtgattcttcacgcatgcttccattcagaaaagtgttgcaatgccataaaaactcatatttgtggctgaagctcaatattattccatgttttctcatttcacctttttcaaatgcaccataaaataacwagtaratggcttttaacatccaaggagattgaatattractcatatgttccttcaatgctgtcactttgttttcaataactcttcataatccaactgactcccatacacctgaaaagaaaatggatcagtcattcaatattataagttgtaatattaatatttaattaaaatatattaataatagaaaagttcttatactactatttacatataaattaacgtgtataataaatttat

SEQ ID NO: 164 - DNA, 401 bp, Glycine max
gcmattgttttggtgaattggtgacagtagtagattgctctgtgatgttgcacaaaaacttcaatcaaactaacagcactctgcatagacagaaggttagggtgcgaaattaaaattactattgtatcgtgcacaagtttttgaaattgaaggcaaaatgctatgggtcatcagatataataataattaaagggatgcacrggatttgtttatggctgctgattttgttagtctttttaaaaagttgtctgtgtgtcattttgaaatattgacattttttggtgaatattttatyaagttgaaattaattatgaacttaaattattaagatacttaatttccagttttggttaaggtattttctgtcaaaaartatacttgattttgttatggtaagatga

SEQ ID NO: 165 - DNA, 401 bp, Glycine max
tataacttgccaaaratraaaaccattaaatcagagtggcgcagcggaagcgtggtgggcccataacccacaggtccctggatcgaaaccaggctctratataaaagagaaaagcttcccatkccttttttattaatttggatatctccatttttctkcttttctcagcgtatattatttaattcaaatcaawcaaatacrgtcttcctattaatttcaaacgaataacatttattcacaatacatattttatcaattaacttcatcccctttwcttttacctttttcatatttcataaattaaaatataatttttmtttacatttaaaaaattacataatcttttattatcaagcaaaacatggttttacaatatatttcaaaatatttacatattcttt

SEQ ID NO: 166 - DNA, 401 bp, Glycine max
tactattatctttgtcatgagttcggtggagggttcttacttcttagaaacgyaatggtagaaataatkatgatttgcgttttttgttctttgttatgttcgtgcagtgttgttggatggtatagtgaagcaagaaagtggaatcaggtaccataaaaataattttgcagggcttatatatagtactattacttgaattgwttttatttgggaaagtgtctgccactgtttaaattaaagtgtagtttccaaaggcttttggcatgggaactctttttgtaaaatacgagagaaattttgtagtagtgcaaatggattgagtaaccacaggaaagtgacattagcttttttcatttaagactggacagagaaatgaactctgattattgacttgccggggt

SEQ ID NO: 167 - DNA, 401 bp, Glycine max
aaatacttgagcaagagatgttcattcagagttcctctaaagccattaatttccaccayttctagacttgaactcaagcattcgcaaacatccaaatacattcartccagaattgtgtgctgttaaaataaaatggtggttcataatcctacaatagatacatgttaactcattggaagtacatcaaattatcacatgtarkaatagtaaggttaawacggaaattcgagtgtaraatycaaaaaaatcttatttgtayttaaattggygtaaattcaatttttaagcaataaacataatatgttagggcttaacataccaaattacttctgatgtaatrttaataatttttctctatttaatattatcwcagtttttactcatatactttgatattttaa

SEQ ID NO: 168 - DNA, 401 bp, Glycine max
aaatagataataaaaaagaactmcmaacaatgacacaagagactttacattttagggggttgatgggaatggaagaagaaagggaatgggkaagggaggagaaggggagaatgrctctagaaagaggattyttcctctttgagatactaaaactttgggtgtatttaatagagctttgactcagtgtgtytttctcccttrtttcttattccttttataggyattagttagcttaaaattcacatgaccttgcgctaagcccgacagytrcgcttagcggtgtgacagtgatcacgcgcttargacgtgcttygcgctaagtgtgtctttagrtttctttgtggattttcttcgcgttaatcttggwctgaccactcagtgagacttygcrttggacttgt

SEQ ID NO: 169 - DNA, 401 bp, Glycine max
gtytttctcccttrtttcttattccttttataggyattagttagcttaaaattcacatgaccttgcgctaagcccgacagytrcgcttagcggtgtgacagtgatcacgcgcttargacgtgcttygcgctaagtgtgtctttagrtttctttgtggattttcttcgcgttaatcttggwctgaccactcagtgagacttygcrttggacttgtcttacgcgctaagagagatrttttaatcttcaacttcttyctygaatttttttcaagtttctacatcaatttaactttaaaacacaaaatttctcttctttaaaatcctacyagtcaagaattaaaatgacattaaaatcctcattattctattaaaaaaacaataaaataaarraaatctaaccat

SEQ ID NO: 170 - DNA, 401 bp, Glycine max
gcatataggaaaatattcaatttacactcactttcttttccatacatatctagcttttttcattttatttttatctttatttttcatcacatctatcactttatctctctcttttttctktatttctctctcttccttccacctcataccatctcatttttgggtttacatttatcaggttcatagcatacataagagtgwttctttcaaatggaacttgttagttgtagtgaccatatagacatggacgctcaaacctttatcctacatactatctagattcaataattagtaaatctaaacgtaagtayggtgatmcaaaatataaacgaattaatcttaattaatttcactctatttaatgggtattcgttctaaaatatcctttaattaatttagat

SEQ ID NO: 171 - DNA, 401 bp, Glycine max
atataactttcactgagtctatgttagctcaatttgagacacagcaaaaaccaaagctacttacaagaatcacccaycccaaagtaatgattctcataaattgtctgatggtgtgaggtgaggtgagcaatcttcaagctattaaaaatattataaatacattaaattatgtttcttcgtttattgttaaaaaattgaccraagtacamttattattagatggcctggagagagattgacacgtgcatgaattaagtaggacagaagtaggaattataaggttgatttgttggttgaaaaaaaaaggaaagaagagkgtgtaagttcaaattcttccactagcaaaaattaacgaattaacaaataacatttgtcataaaaaaaatgacagaagtataatc

SEQ ID NO: 172 - DNA, 401 bp, Glycine max
ttcactgagtctatgttagctcaatttgagacacagcaaaaaccaaagctacttacaagaatcacccaycccaaagtaatgattctcataaattgtctgatggtgtgaggtgaggtgagcaatcttcaagctattaaaaatattataaatacattaaattatgtttcttcgtttattgttaaaaaattgaccraagtacamttattattagatggcctggagagagattgacacgtgcatgaattaagtaggacagaagtaggaattataaggttgatttgttggttgaaaaaaaaaggaaagaagagkgtgtaagttcaaattcttccactagcaaaaattaacgaattaacaaataacatttgtcataaaaaaaatgacagaagtataatcacagagca

SEQ ID NO: 173 - DNA, 401 bp, Glycine max
atagaaaagatatggtaaactttttaaggatcgatgactgggaatctgatttgggaaatggtgagatggaggttacattggattaagattttaaataattttaaaagatttttttttatataaaaaaaggtcggtggtattaaattaaaatttttaaatartataaataagttttttttatttaagtaagacttaaaagawttttaagaagaataataaaatttggtggtatttagttagaattttttataaattataaaaaaaatacataaattttgatgaattattttttaaaaagtattttgatgaattatattttttyagtataaaatatctataaaataatctcacttaaatccttaagaaagattgttagactttttgttctattagttatcata

SEQ ID NO: 174 - DNA, 401 bp, Glycine max
tttggaataaaaaaatatcaaacatatttcttctttatgcatttttttcctttgttttctaaattaaattaatatttgtcttatatgttaagactaattatgtttttccttacattgattatatctcaactcaatattttyatgaccttaatttcgttattcatgtaatttartaattctcttacaaattttatcactaargtttaggtaacttaaatataaagtgaaatattgtattttactagatgaaccttagttraatggatgcattgaaaattrtttttgttttaactttcaagaaagctyataattggtggtcatctccactataaatagagaarataattagtrgataaacacaacacatgaataaagwgtgtgagaagagagattctaaaaca

SEQ ID NO: 175 - DNA, 401 bp, Glycine max
aatatatattycataacattgtagaaatagtttraaatggttgacaaaatttcatatggtgactatgatsttggagtacttaaccgacatgatatgattaacttattgtaccacccattttattttatggtgtcaatacaataagaaactaaaattaaaaacttagaaatgtaaagtgtaatttttwaaaaaatagaaatraaatttattttgtcattaactttatttttacgagatcggtggttgtagtggtgaattggaccctataatttcatctatcattagctttcgtggagtagtgtcgataaaaaatagatgktaaattaggtggtgtttgattagaagatttattttatttttaaaaaatawtttttatttttaaattttaagatttataaaac

SEQ ID NO: 176 - DNA, 401 bp, Glycine max
gattccctcattaactagtgaatttawgcacggctaataaattcttctaaaagaacaatgtaactcaactgattttcttgacttgtgagtttgacaaccatttctatcatgttcaaattacttttcactgaatcaatgtatccattaccgttgacatcttaattgctgtccaatttatatattcattttattttaactaawgatttagcatggttgaggacattgcttctgtacccagaattttatatgttagtggtctattgtctaaaatatatggtgatgatatgtggtcttctatttgatctatgaaatatatattttcctattgttttttgtggttattgtctcattgcagtctctatttgtgtcccatccttgtctcattctatgacttaatttta

SEQ ID NO: 177 - DNA, 401 bp, Glycine max
tttttcttagtgtgtaataactacatttattttggagacgcaaatgtactaggaagattaatcagaaactckgtggattattaaaaatcggtgatgttgacattctaatatatctaattacgaaatttattaatttggtttaacacgtattwtcgaataggtcgttttttcttgatttttatatataatggcaaaaataamtgattagtttttcaaattcacttagttattgataaatyatttagtattttagtctgaactgataggataaatatgactgaatattgttatttctgaaaaaggcatcgtgtttatattttccaatattagagatgaatatcttttaataaaatattaaaagttatmatattttatgtttatagatgaatatcttactttat

SEQ ID NO: 178 - DNA, 401 bp, Glycine max
cttatkaatgttcagttttaacaagctcttccttaaaaaaaaaaaaaatcattaacgttgcaattaattgaattagaatctcctaaaaaaattaattagaaagtcaactttggaaaaaatataagaaaaaagtatctgttagaaagtcaagtttggaaaaatatcagaaaaagtatctrttagaaagtcaatttaaccatytaagcttttatcttaaattatactattagaaaaaatcattaaccgaaaaccgacgttgttccttcctcgctggagtgacgtcaaagatttgaactagtcactctcttacacatacacagaacccgatcccatcctttatcaattaaacsaaaaaatcattacacactctctttttctcatcccttcttcaatccaatcca

SEQ ID NO: 179 - DNA, 401 bp, Glycine max
gcctcctcaaatcacacctccataartcaaacatttagtaacaaattagtccaccttmtaaattacacttacgttatcgacatcattgtcataaaccacgamaactttgtcaatgtctttgagtgyaactaggtcatctgcatcgtcatgatgacmtatcgcgayatcaatgtcamaccaaaaaagcttagttgtaagtayactgagatctacatggccctcaacatcgtcctccagagcgttaacaacacctgccttgtcaccatgctcgcaaccatggacaacgagagcattgccaagatgttccaagtgccatgytagttacatttgtatcatgtgtgaacgaaggttaacaaaaatagtgaagacttgacmgttggaccaacttatcacaatatttg

SEQ ID NO: 180 - DNA, 401 bp, Glycine max
tggaccaaattgtcaattggagtatgtgtgtgtttttaccttttattaattcaccatttatcctcttcctttttacattttgtgagaaagatgttgaattgtgggtgctaagtttgctttgctctttcctgcctttgcatcatcggtgyctgtgacgacttaacgacagatggtggtgtttggttggtggccrctgttttygtttgattttttcctgtgcgttgacggtgaaagacaactttataaggtaagatgttttttgtttgactagactttattgatgacctccattctcgtaacawttctccatgtgacagtcatttttgttagatttcttcctwttttttttgttattgwagacaaacaagggattaaacatgtgttagrgtttagggtttstt

SEQ ID NO: 181 - DNA, 401 bp, Glycine max
atttgatggggaacattttgtcgttctagaagaaaattttatcatgaaattaggaagaagagccttttatttttaaaatagtcattacctttataaatttwaaaatcgaaattaaaaaaatcactaacattttagttcaaaacattgtaactaatgtggaacatctyttacgcacatggatttgccacatcatccagaacrtgtcacgttggtattcaatgttaacatgaaccgatgagactttgtgttagaattaaattatcgatatatttatccatttttttgatacggtggcaatttttataaattatttttaaaattaaaaagacaaaattattctttatttttttgtcttattttctaacctcaaactgtttttttaagcattgcaattaawtttt

SEQ ID NO: 182 - DNA, 401 bp, Glycine max
aataaaaagattcgaataaaaaaaattataaattcatatttaagaaaaataataaataagaaaaagacagaaattattttgacgaatcaattaatctcttactcatcacaactagtagattatctggagtgaactgtcaaaataattaataaccatgaagttagacaatttttaatttttctttatatatgcactaatacwcacaccttattcagtgattttgaagaaacgttgtaaaaagtattatggtcaattaataaaaatgaaaactgacgaaaactaaatttgtaaactaacttgcatttttagaggattatatacatctttggataattatartgtacaatttcttcttacaagctagctttataatttatattaatcttaacgagttgagctct

SEQ ID NO: 183 - DNA, 401 bp, Glycine max
tcacctcagatgattggagatgatcactaaaagttttcatgctacttgactttttattttatttaactataactaatattttaactttcacgatgcacaagacaaatatttatttctataatatataagtaggttctctctctccttctcatttttaaattttacattatttttacttcagtttttatttatatttgtaryaagaaaatttataaacaacaagcatcatttttttttcatgtatgagtttattcattctttctcatgtcttaccttttwtttcaatgaataaaattaggtggtgataatagctaaataattatacttttataatagaaaatgaaaagaaattgtttttaaaataattattaagcagttatttgcgcttaaatgttaaagaa

SEQ ID NO: 184 - DNA, 401 bp, Glycine max
ggagacacaggcgctaagcgagacgttaaatacgaaagttgatactcgcacccagcragcaacacgcrccaagtgaacaaaaagcagaacacgctaagcgagaatcacatgctaagcgcgcgatccaacataagtagcacgcgctaagcaagaggaggttgctaagcgcacgatttgaacgcattaagcgcaggctgtcgygctgagcgagcccacgaaggyccaaagcctacttcagcarctataaataaagagtcagtccaaggggaacgacaaaycgagtctcagagtactctcattactacctaaagcctgagaactcttcatctcttttctctttttgtatccattctttctttttcccctctcattgtaaagctctcatggycatgagtggttaa

SEQ ID NO: 185 - DNA, 401 bp, Glycine max
gacgttaaatacgaaagttgatactcgcacccagcragcaacacgcrccaagtgaacaaaaagcagaacacgctaagcgagaatcacatgctaagcgcgcgatccaacataagtagcacgcgctaagcaagaggaggttgctaagcgcacgatttgaacgcattaagcgcaggctgtcgygctgagcgagcccacgaaggyccaaagcctacttcagcarctataaataaagagtcagtccaaggggaacgacaaaycgagtctcagagtactctcattactacctaaagcctgagaactcttcatctcttttctctttttgtatccattctttctttttcccctctcattgtaaagctctcatggycatgagtggttaatcccctaactagggtctgaca

SEQ ID NO: 186 - DNA, 401 bp, Glycine max
cctaaagcctgagaactcttcatctcttttctctttttgtatccattctttctttttcccctctcattgtaaagctctcatggycatgagtggttaatcccctaactagggtctgacaggcctaaaaarccaagcaatgtatggtgtacttcagatttatcaatgcaaaaggattccttcyaggttttttctattctattrtcctttctatttctwtcttgcattttcatmtttacattcttttaggggttagatgcttgggagagagtaacktctaattaagatttaaagaaaatatgyatrtatcagttttakgggttaggtgtttggaagatggtaaccactaatagaacaaaaagaaaaratttcataaaaaatcattgctagacataaaatgacac

SEQ ID NO: 187 - DNA, 401 bp, Glycine max
ctcttcatctcttttctctttttgtatccattctttctttttcccctctcattgtaaagctctcatggycatgagtggttaatcccctaactagggtctgacaggcctaaaaarccaagcaatgtatggtgtacttcagatttatcaatgcaaaaggattccttcyaggttttttctattctattrtcctttctatttctwtcttgcattttcatmtttacattcttttaggggttagatgcttgggagagagtaacktctaattaagatttaaagaaaatatgyatrtatcagttttakgggttaggtgtttggaagatggtaaccactaatagaacaaaaagaaaaratttcataaaaaatcattgctagacataaaatgacactttttatgcgtatgc

SEQ ID NO: 188 - DNA, 401 bp, Glycine max
ccctaactagggtctgacaggcctaaaaarccaagcaatgtatggtgtacttcagatttatcaatgcaaaaggattccttcyaggttttttctattctattrtcctttctatttctwtcttgcattttcatmtttacattcttttaggggttagatgcttgggagagagtaacktctaattaagatttaaagaaaatatgyatrtatcagttttakgggttaggtgtttggaagatggtaaccactaatagaacaaaaagaaaaratttcataaaaaatcattgctagacataaaatgacactttttatgcgtatgcattttctacgcaaacatctagaacttaatcttcatgcattttatttattgaatcttttcaaagatatttgggagataggtaaat

SEQ ID NO: 189 - DNA, 401 bp, Glycine max
taactagggtctgacaggcctaaaaarccaagcaatgtatggtgtacttcagatttatcaatgcaaaaggattccttcyaggttttttctattctattrtcctttctatttctwtcttgcattttcatmtttacattcttttaggggttagatgcttgggagagagtaacktctaattaagatttaaagaaaatatgyatrtatcagttttakgggttaggtgtttggaagatggtaaccactaatagaacaaaaagaaaaratttcataaaaaatcattgctagacataaaatgacactttttatgcgtatgcattttctacgcaaacatctagaacttaatcttcatgcattttatttattgaatcttttcaaagatatttgggagataggtaaataaa

SEQ ID NO: 190 - DNA, 401 bp, Glycine max
agatctaatcacattgataaagaaaatcatcaactcatayatcctagacaaacaagtcatgttagrtcctaayatttgcatcttattgatttcctccttaattattttgtttttaattttgactcttataaattttagacttaagtctcatcaaactactattaaattttatttttgcattaatactaacttgagtcacgwtatatatttgtctaaattatattcttaattatgttattagttctaagtatacctttaattagacttaaagacattttgataattacatactcaaaatcaatcttaattagtagtacaagttttcaaacaaaacattgtgtattaaagtctctttttaaatatcttttatccaaaaaaaataaatmatatcactgtaaatt

SEQ ID NO: 191 - DNA, 401 bp, Glycine max
ttatccaaaaaaaataaatmatatcactgtaaatttttccttagaatcaattttagaaaattattatatgaatacatattcaagcatacatttgagtgttaagaaagtctagttcacttaatcaaataaggatgtgagttattattataaatttcttaacaytgtctttaattcttacagataaaaaaatatacacttaarcaatgaatgtttttatcttctttttttctgagctatcaacatattaacaacaaaactyaagaaatgaaagtattaaaagaatattgactyttattgttctctcctatatcacacctctttcttaccctttcttttgtcatttcttggtcaccaartacaaagtgaaagtgaatatatataatttcataagactcaagaaa

SEQ ID NO: 192 - DNA, 401 bp, Glycine max
gcgtgggaatataacaccatagatcatactacaaatctaacattagcatacaatatacaatatacattatacattatacgccccttttaactatactatcatttaaatacatacatcgcttaaccttcggcgcagcagccaccagcaaggcaacacacacaagtcgcaatarcttaattatctttttttttwwaaaaaaawatgaaaataacatgcatggaaagaaacgaataaagcgcaagagttgattagcaataataaaataattaatcaacgaaaatcaattgcagtaccaagcaccaacattaacattataataaagcatgagtgttaattaaataattgtacgagtttaattaataattaataaaatattctctcaccttcgtttcttctgtatc

SEQ ID NO: 193 - DNA, 401 bp, Glycine max
gtttcaattttataaacttctacatgtagttgatcttaatgtatttcaatttgacttgtttttaaatgaatggtggggtacttaaaaccccaattaaagtgttattcaaatgtaactaaagtcttttcctcatcatagagattgaaaattaattttttttcacttaataatcaaagagtttgtttatccagaagtttggawcgtgattttataattaacgctggaaatatagttttgtatagttccctgaaactttccatggtgaaattgttcttttgtattaaatctacttttacttgaccataaattccatttgaaaacgtctctgccgttttatcttttgtagacacaagatataggcatraacgaagttgcctcaatcttttacaaaaagctttttg

SEQ ID NO: 194 - DNA, 401 bp, Glycine max
gctttttgatgagggacgagaattataaaaaaactgaaaarccaatggtctgagtaaacttttggggacattcatctttggaatcaagttattgtaaattgtaatgtagcaacagtcatagacaattgaaatcctttcaaaatttctgattggaattgttgaaaggatatgaaatgctgattttctacagtgtctgtttcrtaaacatacattttggcatcattatacgtgaaactgttgcaattttatttattttcttataaaagctacaacataacatccataaaaaagaaaataaamgagaaagctacaggctacaagaggtgttattatatttatcttgatattttgcatatcctaaagcttagtcggcttattcttattttattataatataacat

SEQ ID NO: 195 - DNA, 401 bp, Glycine max
ggtcttggcggatccttttccagcgacgactctctttatcccctttgcagatacatagaacttcatcttgtgaattccattccctataagctatatctagctagctttctctccgatcgaatcggcacaggatctgagtcacgaagagagtgtgtgttgcattcgtgtttggatcggtttctgcgattgaaatgagggttragttttttagttgccgcagagagagagagagtggaaatgcgaaaaccaaagtcgcgggaaatgattatattgcaattacaccttggtgttgccatctctcttttcgccacttgttttcacgttatttactcttttgacactcattcaccgacacctccatgacgtgacacccgcatcttygagatgctgcttactgcctc

SEQ ID NO: 196 - DNA, 401 bp, Glycine max
aaataatatatatattgatagaaataatcaacattttattcgtttgttgatatgattttatttttatttttcatttataataagtgaaaatatttaaaaattaaaacaaatattaatacttcctccttctttatatattatacactttttattagattttttcaagttgtttcttgtattaatttttttaactaaaatacycttaatttataataaatattataaattaatccgagycattaaataaatagtamtaatatattatgctaaaaataactcggatgtactcctataatgattaacagcatttttaatagcagtaaaaaatarcatttttagtaaaaacttatacttttaattttttattgatattctaaaaaaatrtttaaaaacttttaata

SEQ ID NO: 197 - DNA, 401 bp, Glycine max
ctcaatttgactaccttggacatatggatgacttcatattcctcttgtttgtcatcttaagcattcaaaagcttttggagcttaaaagttatatacacattgggattcataaagtaraagttttgggttcattcagataaactaaaataagtctaattacccatttagttcmtatagtttttaaacttatcccttttagtycatatagttaataagtgaattttttagtccctgaaatttatattttaattcctaaaaggttcctacagttaaaattctttaactaacagagttaaaawaaatttaacggcagaaactttttgggaattaaaatgtaaacttcatgaactaaaaaattcacttattaaatttcaaggactaaaaagtccatttattaacta

SEQ ID NO: 198 - DNA, 401 bp, Glycine max
gactaaaaagtccatttattaactatagagactaaaagagataagtttaaaaactatatgaattaaatgggtaattaaaccactaaaataaatgctttgatcatataattttcttttagattttttttctagaatttattaatttttacttgtgaaaaagaaaagcacaacccaactttttctttgaggcttttgcttttyttttttctccaaaatacttatctaattaatataattttttcaaacatattttgaattaaaaaaatactttctttttaaatcacaaagaatttgatccatgttctttgttttattccttaccagtaaaaaaagtaaatatattatatatagtaaagcaatataactttctagctacgaagtacactaaagtagtagaggtc

SEQ ID NO: 199 - DNA, 401 bp, Glycine max
aagctgatagtgtaatataaaacccacaaggtatgaatcaaaaagaaaataaagaaaaaaaaaaagagaagaaaagaaaacatgaataaaaaactcaccagcttggtgtaacttatcaatttccctcagtttcttttcttccactttttatggcttattcttggacttaaaatatatgtataaagtaagaaaataaagatrtatttaatgttgatttttaaagtgggctaaatttartgtgataatttatttcaaatttggatgttggaaatttttaastttttcactttacatggatcctcaccttagagtagtttgttagctacatattattgacggttatcactgttttgtaccaagtctagcacataaattgcaataaatatatgatatttatctga

SEQ ID NO: 200 - DNA, 401 bp, Glycine max
ttgatttttaaagtgggctaaatttartgtgataatttatttcaaatttggatgttggaaatttttaastttttcactttacatggatcctcaccttagagtagtttgttagctacatattattgacggttatcactgttttgtaccaagtctagcacataaattgcaataaatatatgatatttatctgaaaattctgtytattttttaaatactactcacatttttatttgaattaataaataacaattagcattcaattttttgttgtacaattatcattctattcaatctaaacattttttagtatgcaaattcaatatttatgtaataatcattttgcatgaaaaaatatattgaactaaggcagttgaaaaaaaaaaragagagagaaaagggac

SEQ ID NO: 201 - DNA, 401 bp, Glycine max
tgaacgaaaacagaagtaatatccatttaagttaatgttaatccttttgacgcataaaaaggaaaaggaaaacgtttcttattcaaaggaaaggaaaacacctaacaagcttggttcgtattcattctctccttcttgttagaccaatccctttttcaattctcatagcatagatctccattttccaattcaaaccctttyctctttctyccctttcttttcagaatccaaatgcgatgttgctttcgttattgtgttttagattttgaatatggttcttctgttattgatttttaggttggtaagttatctacaatctgcatcatggaaggtgttattctgagaagggtcattccttcggataacagttgcctyttcaatgctgttgggtaagctaagca

SEQ ID NO: 202 - DNA, 401 bp, Glycine max
aacatttttattctgaaatgttccttgcagtcatagacatattttattaaaattcagtaaaaagagctttcggtaaactgatagttggctttccaatcattaaaacggttgcaacaaatgctaaggatgaaatacttagatatgaatatttagttatttttatctgcatagtgcatgaagaatttttcagatgcagctacraataatagatgcgctttgagcatttttattttacaaaaattcaactttgaaatattatatatggctcaacatacctatttttcactagctcttgttgttttcaattcctgacatcagacttragtaacttctctggtagatctccatattttgtcatcaattcatcatatgcacttgtgctatggtctgtcaagccccat

SEQ ID NO: 203 - DNA, 401 bp, Glycine max
atcagaccatatttgctgtacagaaaaacagaagcattggacctgttgaggggcttgctctaaattttgtgaaggaccagcaaaggtagtttgctattcttattgaaccttactaaaagaaagagataaatattgtcatatttagatgattgaattgcatcaatcttcatttttggattctttatatatcagatttgttgygaatatctgtacgtaaaaggtcttttttttgggcatgtattttgaggtttgactttcagaggacttgggatgcatttggaattggattggggaaatattttctattttcagtaataattacaaaattsacctcaattcatgtttttatgtgctaacatttaaaaacaaaataaagtgaaactaatgacatttttgtaatt

SEQ ID NO: 204 - DNA, 401 bp, Glycine max
ccaagagtatagatgatgcactctgttcgtttgaatgagatacaaattcatgtgtaatctccgttgatttgaatgagcatcattgatgaaaggtagttgctttgttgcagaccataaaactgaataatttctgcatgagaattgytgtggcaayttgggttgtaatattagttccttggtctcgttccacaratgactgtsattataagaaactcacctctagtggcagactagataaagaaactaattagtaatcaattgttttttatattcttttcctggtaaakatttttatctaatatatttcacttattttcctkttataatttttagtgtaataactacgtraactcgcgccactattttaaccttggcgattgttgaatgcttttgataytata

SEQ ID NO: 205 - DNA, 401 bp, Glycine max
ctgaataatttctgcatgagaattgytgtggcaayttgggttgtaatattagttccttggtctcgttccacaratgactgtsattataagaaactcacctctagtggcagactagataaagaaactaattagtaatcaattgttttttatattcttttcctggtaaakatttttatctaatatatttcacttattttcctkttataatttttagtgtaataactacgtraactcgcgccactattttaaccttggcgattgttgaatgcttttgataytatatataaatcccttttaatgatagtatataatgactctcaaaacaaatttacaratacttgttctagccgtcaagcttattgttaatcatgaatttcaaatgttgatttatgttggaagaa

SEQ ID NO: 206 - DNA, 401 bp, Glycine max
tggcgattgttgaatgcttttgataytatatataaatcccttttaatgatagtatataatgactctcaaaacaaatttacaratacttgttctagccgtcaagcttattgttaatcatgaatttcaaatgttgatttatgttggaagaaaataggtattgttattaataaaaacaatgaaaaattaagttgtaagttcaawgtatttatataagaaaagaatatctaagatactcaatttttcatttatttcatctatgcattttctaaccagaactacatatctaaaaggcatatttaattgtattgacttytggatatactttataaggacatttaagactaaggtrgagataagagctcaaaattaacccttggcccaatcctatggttataagaaat

SEQ ID NO: 207 - DNA, 401 bp, Glycine max
accagaactacatatctaaaaggcatatttaattgtattgacttytggatatactttataaggacatttaagactaaggtrgagataagagctcaaaattaacccttggcccaatcctatggttataagaaattttgwtgtgattccactgtgtaattgtgttctcatcctagtcttgacttcctcatatatatcattgaytgcttgaagatgtgcaacacaaatttctttcttcttaaggccatccacaatatctttcttagtatttgatcatatgccttttctaactctaaagaacawatgaaaatcttttttattccaaaaatcttttgtcttcattaaatgctatagcaattatattgcttccatagtttrcctcctaggcataaatctaaattgtt

SEQ ID NO: 208 - DNA, 401 bp, Glycine max
acagttgtatgwgagtctgcarcttgtaaagttgtagtccatgtttgggggagaaaatacatatactataagaaaaaatatccaaaagttagagggagraatatatgtgattaagactagaacataaagtgatgtgatgggatgggagtttaagttattttgaaacctaatcatctttataaaatttaggacgtgtttggyttcagaaaatatgtattcaatttttattttyataaataaatataaaaatcttatcttgcatttactttgtttactattttccatgttcyacaaattattttggttggtcctagcacaaatccttgacaatagggaacaaagtaagcataagatgatatttttgtaattatatgtgagaattcaaaatgaaaacagagaat

SEQ ID NO: 209 - DNA, 401 bp, Glycine max
tagagggagraatatatgtgattaagactagaacataaagtgatgtgatgggatgggagtttaagttattttgaaacctaatcatctttataaaatttaggacgtgtttggyttcagaaaatatgtattcaatttttattttyataaataaatataaaaatcttatcttgcatttactttgtttactattttccatgttcyacaaattattttggttggtcctagcacaaatccttgacaatagggaacaaagtaagcataagatgatatttttgtaattatatgtgagaattcaaaatgaaaacagagaataattattttattagttcagatgatccttgattcatgtaaattttttatcattaccaatatacaagtgccatgtggtatagtaataaaaw

SEQ ID NO: 210 - DNA, 401 bp, Glycine max
ccatttatcagttgcatttaggagttcattgcaatgatggttttrctttaatttcagtgtggtaatgtactagttccaacttcttatgttggayttcaattatgtatggctctccagaatggcttgtgagcatcyaaaaataagttttcatatggagtaatctatttcagtatttcctttgctacatttttttcttgtccstttgtttcttttgttctcccctttcaatatgcatacttaakacatggatatctatctctctatatatggatacaaagttttcgtgttcttgattcccaagcgtagtgcttctttcccaatgctgcctatcagtactactagtaggttagggttttttcttgaattcactcttccatccaaatccatgcacacacgaactt

SEQ ID NO: 211 - DNA, 401 bp, Glycine max
tttttctttgctggataagggggaaacaaaactaaaaggaaagcaaaacattaaacgagagagtgtcggccagaagaggagaacccaactgtgtcatacatgttttgttttccatgcattactgaagattamgattaagagtatgtttggaaatctgaatgttcgaccacatcttagacattactaattatatgcataagwtttatcagattattttcaggagyaaaaggtggtgaaaaaaaaccgaaaaagctgtgtaaaagataatttgttaattgccaacgtgrccttttctggtyggaatttgatcatatacaatattcatattcatttgggtaatttttttagtgagcaaattcaattttgcaggagataaaattgattttagaagaaatataatt

SEQ ID NO: 212 - DNA, 401 bp, Glycine max
catgttttgttttccatgcattactgaagattamgattaagagtatgtttggaaatctgaatgttcgaccacatcttagacattactaattatatgcataagwtttatcagattattttcaggagyaaaaggtggtgaaaaaaaaccgaaaaagctgtgtaaaagataatttgttaattgccaacgtgrccttttctggtyggaatttgatcatatacaatattcatattcatttgggtaatttttttagtgagcaaattcaattttgcaggagataaaattgattttagaagaaatataattttgttaarccttttgttatttwcttgactttcacaaacaatgtttgagataattaataaataattgaattttttaattatgtctgtagaagtttaatt

SEQ ID NO: 213 - DNA, 401 bp, Glycine max
atataattttgttaarccttttgttatttwcttgactttcacaaacaatgtttgagataattaataaataattgaattttttaattatgtctgtagaagtttaattttttactgtatatatgaaaatattttatagaagaaaaataagcatacgttaaccattttttttgctgaamaaaattataactatcggtaattatmatttcttttagaattatattattcatataaamaacttttaaaatagcttctataatatgtttttttctttcacattcatttttaccatatatgctgaaaataaaaatagtataactatgttgtattttcttaattatataaatataatctatctttctaacgaaaaattgcacctgagtcctgacacgtacatagtctat

SEQ ID NO: 214 - DNA, 401 bp, Glycine max
tatatttcattatttaaataaaatcaatctttcttgagctcgtcttaaaatatmttttttcacgtataaattaattaatattttaacgtcattatccttgaaataaatcctaataaataaaatataaaagaaaccccccaccatcgttcgatcattcaaatcakaactcttccaccagcagccttaacaaacatcgtagcktataaatcragtagggccaaacgacatcgtataacatttccccgcgcgtggaatcatgataactaataacagatacattgaccgtataaacatacsaaaagacgtacacctcttttcgtatgtatatttgtattgtcactgtgttcgtccttttctcagcaaaatctctgaaacagcgaaactctccctctctctctctt

SEQ ID NO: 215 - DNA, 401 bp, Glycine max
attaaagtcaaggtgataattaacgtaaggaatattttaattttatgatgytacctttaaaggttttaattatgatgttttaattttgaggaaaataataaaaataaattttggatttttgtggattaaatttgtgaataaatgagaatgaatccttttcacttytayaggtgtgaatgaattttttatatgataattaaytgtraagttattaaattttatcatggtaattaaatacatgtatcctcaygtttatcttccatagaagacaatgctacttgactcttatgcaggataatttgaatttgaacgttcatggtttttttttactaataaatttgtttgttactattgaacttgaatcattggttttttaaaaagaatatattttcagaggaaaa

SEQ ID NO: 216 - DNA, 401 bp, Glycine max
gytacctttaaaggttttaattatgatgttttaattttgaggaaaataataaaaataaattttggatttttgtggattaaatttgtgaataaatgagaatgaatccttttcacttytayaggtgtgaatgaattttttatatgataattaaytgtraagttattaaattttatcatggtaattaaatacatgtatcctcaygtttatcttccatagaagacaatgctacttgactcttatgcaggataatttgaatttgaacgttcatggtttttttttactaataaatttgtttgttactattgaacttgaatcattggttttttaaaaagaatatattttcagaggaaaaaaagaagatttaattgcattctttggagagtgtattggattgtggtttt

SEQ ID NO: 217 - DNA, 401 bp, Glycine max
aacttccagaactaaaaatgaaaaaaacttaagaacttacacttgattcaacaaagtccgtgaggaatcttggtcgccatcgcgcacccgcgaaccagaaatttcaattccctccattttcccctcaaattcaaatcccctaaastctcccttatatacattacamacacacacctcaattcaatttccatggcgaacttygaagtgccctcattttccctaggcytcgacgatacgcccccccattccccaatccatccacctctttctcccgatcttcacgtctccgactccgactccgactccgatcccgaatcccgacccgacccgcctcgccccctcctcaaacgcctccgccgcgggcccccgccaccgtgyctcgaccccgatgccgacgccga

SEQ ID NO: 218 - DNA, 401 bp, Glycine max
aatttggtaayggaggagcctcaaacatgcagggagttcaaaatggttttattaattgctcaacaagggggggaaacraatcaagtaatttgaatgttgatggatcttttaatgcttctggaggctgggtggatcccaaaattgtttctccattcagccatggggaatcttctagaaagaaagcaacaaagaggaatggcwctaagaayagtgtctcaaaaagtaatagtaaagcaaacaaatcaaaccctgcgaaccaatcatgtgcttctgggggctgggtggaacccaggagctgcaccagtttgccaaaggatgcaggcaaaaggcgtrttcaagcaagtggtgaatctgctggtcattggtttacatcgccagaaggaagaaaggtatgagaaaaa

SEQ ID NO: 219 - DNA, 401 bp, Glycine max
aaaagtggggaggagttgacaggccgcaatgcttatagacaatatcggaaggtacatrtacttgcataccattctgatgttttgttgtccttttggttgtgatgtagcactgaatgcctttgatgtttacaggagagtggagcaggattcaagaaatcaagaaagaaaaaaggtgccaagacgacaaatgccaagaagagraactgaacacttgatggcaagacatttattccccgcctggtccacaccccataatttacttgtggatcttatgactagcaataccctataggttcaattatgctaaattgccctaaacttccggtatcatgtgttgaatgcggacaaggaagctagccatccagcatgcggcatcacacgaggaaactgaatgagggtct

SEQ ID NO: 220 - DNA, 401 bp, Glycine max
ttggttctctttgtgcttattatgatcgcttgttgctatgtcaattatgcataatttacttcgggtgtttgtagattaaagataataatggaacgatagaaatgatagcatattttaagtaaatgaagacatcgagagggccttttcttgggccttttcttccgtctatcttgagctgaggatacgagatgcttcgcctgwattatttgggctctttttgttgatttttattggctccatttgttgatgtttaatgcacatgtaccaaataaatactgaagtttgcagacgatgtaaactwaaattaggacatcatatttgtgagcggaaacttaaatcaggasrtacgtgagattagcttacgtgtacagattaaaaaattaggaattttcaccagaaaa

SEQ ID NO: 221 - DNA, 401 bp, Glycine max
atttaggccttcagttcattcatcgtcttcattgatgattagaagtattctgcttgtcttcrcccttgtcttttggaaatggagaacccttggatttcaatatctgttggcatastctgaaaacccatcaaaatagaacattcattagttttgagataaaatcaatgtatataatgacaatcaagttaaattggagcaaaygaacaatgctttgcttcagaaaggggtataattctgacccaaataaatgatcatagtaccctacwgttatgcatctctgaaaaggaaaacagaaagttaaaatcatacgagtttaaatcttctgtcttgctcttgatatcacttgacaataatactggatcaaagttcttagggtaaagatcttgctgttgcctcatctc

SEQ ID NO: 222 - DNA, 401 bp, Glycine max
gtcacttaaaaactgatactaagggaaacatcccacaattatatttattcacttgtttattgttgtacctgttctttatcttggggtggaagagaatctgcagacattcgatactctacaatgcaacttaacaaatctcttgtwgcttgtggtcttgcttctgtgtctttataccgaaactcaattggatccaccagctgyagaagatggagattgtaagcaagaagtatggcgtatgaaacatggagattggagaaacaaaagtaacctgttttagatcttctagttttgcagaataagcatctacagtttcgtcatcaccatcatcataaagccaatcctcagtcgctttcaggctcctagatatgtccttcctctcatgttcgcttgaaaagcttaga

SEQ ID NO: 223 - DNA, 401 bp, Glycine max
acaacattgcaggtcttggatttgactcctctaaagtgagggaatrcattctaaagaataaagtgcatttataaccattgaataaaaaatcaacggttgaaactatgataaaatacaagcacatgtataacaagtagtagctttatacataactgagtcctagacttgcaattcaaaagtaaaagctgcaattatgatgaygattaccctatagtatatactatttttttactgtagaattaaaaataccaaaacagtaaaatgaagaagatgaataagctcrtagagactataccacatgcctttcatgaagcacccaaaagaagcaagaacagagagggtaataattaattaaaaaaattaataacaaagaatcacggacaagatgatctaaactcytt

SEQ ID NO: 224 - DNA, 401 bp, Glycine max
aagggctcattaaatacggagatattcttaatccctaagccacctttctgttttggaaggcaaacagttcccattttcccaggcaatyttcctattcctccttccaaacctacccatagaaagtttctctccaatctaataaacttcttgaccacaccttaggcatcttataaaaagaaagcaaatacaagggcaaagaasaaacgatggatytaattaaacacattctaatgccaaaggataaatttttgctcctccacttgggaagcttggaactcattttgtaactcgttaactgctccaggtcaacccctatgcctcccaacttactctcrttgaactttacttttaaaccrgatgtaagttcaaacttcttaagattgctccgaaaactataacat

SEQ ID NO: 225 - DNA, 401 bp, Glycine max
tctaataaacttcttgaccacaccttaggcatcttataaaaagaaagcaaatacaagggcaaagaasaaacgatggatytaattaaacacattctaatgccaaaggataaatttttgctcctccacttgggaagcttggaactcattttgtaactcgttaactgctccaggtcaacccctatgcctcccaacttactctcrttgaactttacttttaaaccrgatgtaagttcaaacttcttaagattgctccgaaaactataacattatgcaaggaagcatccccacaaatagtgtcattggcarattgaagaaggtatccaccttgtaactcctaaaaggattcttggctacagcttgtctcataagaccacttccgtgaggaagagaaaggaagccga

SEQ ID NO: 226 - DNA, 401 bp, Glycine max
accacttccgtgaggaagagaaaggaagccgactgatccccttgtctcactcctttytgwggagtgcattctgagatgggacttccattgactaagatasaaatttagctggattccaagcaagttctaatccaaccaattcaccttgcacaaaatccaagtatttccctcatctcatacaaaaaaactccacaatraatyataagccttctcatggtcaactttaaggatcatgcactccttcttacaccttttagccttctccgccacctcatttgccacaacaacaccatcaagcatgctccttcctcctrrtaaaagcccccttacctctmatcaatgtattgagtaccccttccaacttccttgrtaacacctttgcaatagtcttatagatacat

SEQ ID NO: 227 - DNA, 401 bp, Glycine max
cttaaagatttggatgwaaaactccttatttatactgaattgaattggacattctgagaggcttgtattattaaattggatgamatggttttttatatgctattttgagcctgtactcaatacattgatsatggttaggtgcttttgtaacacctgagscttttggagatattaggaatgtcccacatcattatggttagstgyttttgagccacatgtmcytgtaacatttattgaaccatgcctcgcctcacctctctctcatttgtttctatagacttaattaaatttttartttttwaatttttttaaaatttaaattttaatctctaaacaaaaatttgattagtcatgtaaaacttttttattaaactttttagtyaaacttttattcagagtta

SEQ ID NO: 228 - DNA, 401 bp, Glycine max
tttaatccttattacagaaacatataaaaatagttagttacaaattagttataaattatcaactattttttattataagttatcttgcgataaattagttacaaattactcgctaatatttttgtcgttaattgtaattgataatattactcatattttgatgrtaaggactaaaaaataattaagatataaagtataggrgctaaaaagaatactttcaaactatagagactaaaaaagaattaaaatacaaattatcaggactaaaaaaatcactttcaaattataaaraataaaagagaattaaaatataaactatagggactaaaaaaataamtttaaaattataagaactraaatgtacaaataattaaactataargaccaaataaataattaaa

SEQ ID NO: 229 - DNA, 401 bp, Glycine max
attgataatattactcatattttgatgrtaaggactaaaaaataattaagatataaagtataggrgctaaaaagaatactttcaaactatagagactaaaaaagaattaaaatacaaattatcaggactaaaaaaatcactttcaaattataaaraataaaagagaattaaaatataaactatagggactaaaaaaataamtttaaaattataagaactraaatgtacaaataattaaactataargaccaaataaataattaaatcattttttctawgaaggaacaaaaatatgagagataatcacaagagtatrgaggaaaacaaaaaaaagtgttaaaaaataatggcaatggattaatcgggccagcccaatcattcatcacggcccattacttagc

SEQ ID NO: 230 - DNA, 401 bp, Glycine max
taatgtacacaggccacttgggactagggttgtatttgatgatgagggccacacacttcctccactagccaggatagcggacacacagagtggcaaagaaatgttgctcgatccaggtatgtccatacttttcaactgcaaactgaagttgatggtgaaattgttgcttgtagatgtatatacgtgtcatttctttccttrttttcatagttttgtgaaaataataaaaaatgtttaaaatgttaaartatagctacacacttgtttaccaattagaaaacccttttgtattttctgcaatcgtcgttgawtttgagaacctgatcatggctagatctcattctcatcaaatcactgtataccattttggtcttcagagcattgaagtagttaacttacat

SEQ ID NO: 231 - DNA, 401 bp, Glycine max
gatccagcagtcactgccatttgaccgatgcacacaaccagtaggtcatcaacttccttcacacttagtatattcatgctgtcattcaacagaactggtggatctacgacaagttgtgaaacaataggtctcaacaacatctgcagcaagcatgatataacagtcagtgagggaatataacaagcaactatattactgaakgaagctgaaagatttaggaatattttattcctcaatggaatgagaaaagggaatgagaaaacatacaaactatttttaaatggaatggaaaaattcccaattaatgcataacctttaaaaaattccrctctaggtggaaaaaaagccttctagagaatttttttcataaccactccaaatggtaaaaatagatactgatg

SEQ ID NO: 232 - DNA, 401 bp, Glycine max
tatatatatatatataaaagcacrcaacactaatgccattgctatcacaataggaaaccaaaaacagcatctcaacattaaacctacaaagaaaaaacaaaatatgacatatattctacaaagaatattccagttcatgttttgataatgaatattgtaggatagttgtctaaattcyagtcacacctctttgggggttgycttaattgcaacctcaagggtggtgatttagtcccacgtcaactagatatgtggttaaatagaacttatgaagcttgggcagtcctcaccttacaagccagttttgtcaggttgaattagggccctaagtccaatttctgataaatatgttcatctaaaaaaaacaagtstttataggcttattcaaagatcaaaatatt

SEQ ID NO: 233 - DNA, 401 bp, Glycine max
cctttgtycagcataggtgaacatggatatatttaggcacacacccacatgattaagtctgaaactctcaacagtgaggagattgtttgtaatgttattgatagtaatttaytggaatggattttgatgaattttataggatcttttaatataaaatatgaattttgatgaatattttttgtttgtaatcataattatgawtttttatagctcataaaaaagtcttatatagtatwtaaaagtgtamagatttttgatgaatttttttagatagatttggacgaattttataggawttttttagtataaaacataaatatcacactcaacaaacaattatattaractcttcagattttctttttttttcttacagaacttatctttttttctatcacaca

SEQ ID NO: 234 - DNA, 401 bp, Glycine max
ccaatcttaaaaatagaattgtrctaaaacatcgatacaaattcccaccctcttagcatagttcaatttcaatcagtaactgattgctttatctgagmctgctcctgtccttgttcagcagatgtggcacagcaataatctgtaaagtttcaataaactcattggagtggagttctccatgcataacattatacagataayccactgggattcccatgttgtgttttgcatacagggaaakgatatggaggcaaaaaaaactcttacaagtttcatggttcataatttattgtaaatagattctattttgggttgaagcaacttcttcgagttgttcaatcaaaagaagaaaggacctcaacaggaaaagtgtttgctcagtctctcctctttacagcgcc

SEQ ID NO: 235 - DNA, 401 bp, Glycine max
gacaaataaccagctttaggctgatgtctcacatcactatataagcttgtcttgttcacttccaacttcamgtgtggcaaaatgttcaaccaaggattttcactataaattctttttgccttagcccatgttccatccagaacaatcaagttcttcacctcaaaacctatagcatccaggtcactaacatcaacagccatwtcagagggaaatagtagtaccgatccaggacgaacctcaagctcaaattcttcacattcttccaattcttcatccctattcagttgcttcctttgaaacttcttcaccaaaaacccttttgagagtgcttcacaagcttccgggtacgccaaaatattgtcaaagcttaactcgggggattgacattgtgcttgagtcat

SEQ ID NO: 236 - DNA, 401 bp, Glycine max
cccataacatataaataattttaaaactactctatttagtttttttttaaaacctacttttctaaaagagttttcttgagtaaatttacatgtgagtatcttaaaaataatatggrattttgtgatcactataaatkattttatatatttgatgatattcaaattgagttttttaaggatcttcgattagatacgtccttrgaccaaataggtgtcattgtaacttattaagatttaataaaaaaactttttttataaaatgaattttcttaaaaaaatctaaaacaaaagtttaaaaaaatgagactgtagattctgggaatgattcttaaggagcaggtggagggtttggtgggtgttamtatttgacttgtgcattccacacgctgcttccgattsaa

SEQ ID NO: 237 - DNA, 401 bp, Glycine max
aacgaccagttgttggtgcttcccatgatagattaattcaaaggaggctgaggttgcatgttgatgtcctttgtgattcttcacgcatgcttccattcagaaaagtgttgcaatgccataaaaactcatatttgtggctgaagctcaatattattccatgttttctcatttcacctttttcaaatgcaccataaaataacwagtaratggcttttaacatccaaggagattgaatattractcatatgttccttcaatgctgtcactttgttttcaataactcttcataatccaactgactcccatacacctgaaaagaaaatggatcagtcattcaatattataagttgtaatattaatatttaattaaaatatattaataatagaaaagttcttatact

SEQ ID NO: 238 - DNA, 401 bp, Glycine max
ccagttgttggtgcttcccatgatagattaattcaaaggaggctgaggttgcatgttgatgtcctttgtgattcttcacgcatgcttccattcagaaaagtgttgcaatgccataaaaactcatatttgtggctgaagctcaatattattccatgttttctcatttcacctttttcaaatgcaccataaaataacwagtaratggcttttaacatccaaggagattgaatattractcatatgttccttcaatgctgtcactttgttttcaataactcttcataatccaactgactcccatacacctgaaaagaaaatggatcagtcattcaatattataagttgtaatattaatatttaattaaaatatattaataatagaaaagttcttatactactat

SEQ ID NO: 239 - DNA, 401 bp, Glycine max
aatcaccgcataaccattcttctactactgtgccctccaaaacctacaaaataacacatttyaaaaaataaataaatatataacttgccaaaratraaaaccattaaatcagagtggcgcagcggaagcgtggtgggcccataacccacaggtccctggatcgaaaccaggctctratataaaagagaaaagcttcccatkccttttttattaatttggatatctccatttttctkcttttctcagcgtatattatttaattcaaatcaawcaaatacrgtcttcctattaatttcaaacgaataacatttattcacaatacatattttatcaattaacttcatcccctttwcttttacctttttcatatttcataaattaaaatataatttttmtttaca

SEQ ID NO: 240 - DNA, 401 bp, Glycine max
ttaccttttatattkcttataatcctatgtatttaataggggtcttcagaatcaaatcaaattaaaagtaaaatcgaaaatcgataaaaaaaaaataattgtagaaaaatagatgattgttgatttgatttgatttttgtttcaaattktgtaatttgattttcgatttaataaacgaaaatgaaattaaacttaatcaakctgatctagtaaatttttttaatatttggcttgatatggttgatatataatttctaaactatgttaatttttttaaaatgcaagtaattgtattttattgtaattggtgatgcttcattctatacaaaattcaactcgtggcaattgataattttgtattatgttgtgacwgtgggagatctacttttcaagtttttata

SEQ ID NO: 241 - DNA, 401 bp, Glycine max
ttgttgaatatctaagttttatggttgaaaacaaatattataaatgctgttttattttttttttaagttcagttgttaaaattgttaaaacttggaaataagtattatgtattttttatattttaarttgaataattattattcaacttaaaaataattattgttttactttaagtttaattattgaaatttttattgttsgtttatattattaaattaattattattcaagttttattcaattaataataaatttttwaaatwtttttaaatatttattagtataattttaaaactttaaaaataaaaacaaaccaaactataaaacagttaaatttattatgtaattcagactactaattctaagtcaagagcacaccaaacccctcgggaagactcct

SEQ ID NO: 242 - DNA, 401 bp, Glycine max
caaattcaccaaaaccttatytttcttccttatttatgtacaaattaaacacraaaaatactttctttccattccttttttttcttcatttcttattgttaacatccaatgatttttttgcwtattattagatgtgattccggacgaaakttgggtttagcataagcttctaatctcacaatatgatgaattaatatttgrattcttattggaagaggtgccactatgaaattgtacattgaacaaattgtcwccaaaagaggatatatgtgaaaaacaaaacaaaaagtaattattaagttgttattacagtaataaaatccttttagtgatttagttgtaaagtaaactaaaataatgagtattattrtagaaatcaattttcttraaataaagaggag

SEQ ID NO: 243 - DNA, 401 bp, Glycine max
aacattttattttctatttttttaattaattttactattatcatttgtaattgactttagcaaaactaattcaaaagcgcgtttaacttcaaatacattagacgtgtccaacatgctaaatatttgtgtgttattaacaatccaaataataaacgtttgcttcttttggttaatattttattaaatactagacgtgtttawcatgttaaatattaaatgyttagttttttagtagatattttattaaatattagacgcgtttaastttactactattattaaataatagtatatattttcataatttcatactaaaatataattaaactttaaaatacaaaatatacaatacttttataaaaaaattccacactctttcaattggtttttaatttataatt

SEQ ID NO: 244 - DNA, 401 bp, Glycine max
tcaagtgcaacccacaacataaatgtcaacaaaattttcaagtttatcatggccaagctctttaacttaccatggacagtggaacgaaatttgagagttggagaacccataattgacttctaaattgttctttacacaccgattcgtatgtatatagcaggacaaaggagaatgagaaagaaagaaagaaaacaagtcaastttttcatattggctgggacctatcaacattcaccacctagatacctaatttccatgtctcaataggccattttgactataggcttacccctgttgtggctgaggtcaaagcccacaggtcttgataatttaatttctacgtgccctgataaagaagaaattccatttccatataacttttgtatgatagatttttttat

SEQ ID NO: 245 - DNA, 401 bp, Glycine max
aaagccattaatttccaccayttctagacttgaactcaagcattcgcaaacatccaaatacattcartccagaattgtgtgctgttaaaataaaatggtggttcataatcctacaatagatacatgttaactcattggaagtacatcaaattatcacatgtarkaatagtaaggttaawacggaaattcgagtgtaraatycaaaaaaatcttatttgtayttaaattggygtaaattcaatttttaagcaataaacataatatgttagggcttaacataccaaattacttctgatgtaatrttaataatttttctctatttaatattatcwcagtttttactcatatactttgatattttaaycctgattctttatgtaaaaaagtttaatctatctatt

SEQ ID NO: 246 - DNA, 401 bp, Glycine max
ctcagtgagacttygcrttggacttgtcttacgcgctaagagagatrttttaatcttcaacttcttyctygaatttttttcaagtttctacatcaatttaactttaaaacacaaaatttctcttctttaaaatcctacyagtcaagaattaaaatgacattaaaatcctcattattctattaaaaaaacaataaaataaarraaatctaaccattcttrtctaatttgactatcaataaaaccaaattagcagtcatcaatacaayaaaaagcagcctccttttttgttaataaaaaataaccacaacatatatagatgggctaaaagcaaattcaaaactcaacacccatatatataggaaaaacaaattccattcacgtaattgatactcatagatagg

SEQ ID NO: 247 - DNA, 401 bp, Glycine max
tcagtgagacttygcrttggacttgtcttacgcgctaagagagatrttttaatcttcaacttcttyctygaatttttttcaagtttctacatcaatttaactttaaaacacaaaatttctcttctttaaaatcctacyagtcaagaattaaaatgacattaaaatcctcattattctattaaaaaaacaataaaataaarraaatctaaccattcttrtctaatttgactatcaataaaaccaaattagcagtcatcaatacaayaaaaagcagcctccttttttgttaataaaaaataaccacaacatatatagatgggctaaaagcaaattcaaaactcaacacccatatatataggaaaaacaaattccattcacgtaattgatactcatagataggt

SEQ ID NO: 248 - DNA, 401 bp, Glycine max
ttttcataaccacamgtgaaaggacaagaatattagataactyaaaatcaaaaacaaaagaactcaggtcaatttcctgtttgaaaatccaaacccataaatcaggtttcacaccagyttcacagtcagcagcatatgtgtatgtgaaggtgagaactcttaattattgtgagaaatgaaaacattggattacaatattaractgaaattaactcttaattgcatatttaatttccaatctcacaygatctttgattaaaaaggaaaaaatcacgtgagayttataattaaataaacaatttgaactgaaawtttaaaatcaaatgtttataatggaatgtttgcatttctcaaaataaccaagaacaattaagattaaaaacaaaaatcatgatactttt

SEQ ID NO: 249 - DNA, 401 bp, Glycine max
gaaagcaggctcagcactcttaatgatatgggtgaatgatacggcaacttttgacatgctaacagttgccgctacatgtcctattgtatgtagaacagcaacctgcggtgaaaaacagcaaacactaaggtcacaatccatatcaagatgttaataaacaaattgaaaagccaaaacsattcaagttcttaattgaattgyggtcacagacacggtctaggtttcatcaggatccttgatattgcggcgaattgcagccacaaaggccccaaaagccttgacattgcggccaaaatcacagtcacaaacaattttcamaaacctttccaaaacttaaatttccatcgttaaaaaaaaaaaaatctctcttgtaaacctcctcccaattcatcaayatagtt

SEQ ID NO: 250 - DNA, 401 bp, Glycine max
ttaagatatgtgtcatatatttctcctatttggaataaaaaaatatcaaacatatttcttctttatgcatttttttcctttgttttctaaattaaattaatatttgtcttatatgttaagactaattatgtttttccttacattgattatatctcaactcaatattttyatgaccttaatttcgttattcatgtaatttartaattctcttacaaattttatcactaargtttaggtaacttaaatataaagtgaaatattgtattttactagatgaaccttagttraatggatgcattgaaaattrtttttgttttaactttcaagaaagctyataattggtggtcatctccactataaatagagaarataattagtrgataaacacaacacatgaataa

SEQ ID NO: 251 - DNA, 401 bp, Glycine max
catttgttgagataaaartayctttatgtgacagtgttatcatttcttataaccattgaatgaggtaatcrgatatctagayatgcactatttgaggtgagttataatcttataatcatwtttttatagttagattgttccgtraatataagtaaaaagtattgtaccacattaaatttttgtgtttattattatttttcmtgtagtgtaatttttgttatattctcaccatcctttgtgagatggataattttgtttgtggaaggttgattacccaacactcgccaaagtgagaataktaratcgataatttgtggtgatctttagattccataatttgatttttaatttcaaattactaaagtttacattttaaaattgtcacaaattattaatttatt

SEQ ID NO: 252 - DNA, 401 bp, Glycine max
atagtatccaaaaataatttaatagcatcaccataataarcattcatagttctgacttttttttgccattgccctgaatatatgctctgtatctccaccctagatcagtcctattttcaagagtgttcatcctagtttcagtagcaacagtgttacttgatttgcatcatggtaatggatgagccataaactgtatgtttygtcaaaatgctgtgttttaggcaaaatagatgtcacaggacagtagattttcaggctcttggacttgtgaatttgtacatgtctacccaatgctacccactaggctgccttttggtgagaaattacatgactcaagcttgtggactgtcagattccctcattaactagtgaatttawgcacggctaataaattcttctaa

SEQ ID NO: 253 - DNA, 401 bp, Glycine max
attataaaaattaaaaatatcactttcaaagtataaaaactaaaaaaagatcattttaaaawtaatttaacctaataaaatattaaaakttayttattacctattaactttcattttacattttagtattatttatttatttttatcaaatattttatataattgaagtttttaaatagaaaataaaaacaacacaacttmatgataaagaaaaatgtactataaagggcttattgaagcaaaagaaggatcaaacaaagagatcacaatttttttattcactgaaagcttaatggttcgattgtgaacaatttttttccttgtaaaagaatgtaaattttacyaaaatataatttttattattaattatcttaatgtgattcatattattattattatta

SEQ ID NO: 254 - DNA, 401 bp, Glycine max
caaggagtgttcaagttttgggacaaaattacttcaattgataaaaaaattatacaacaccagaacccctgcatcccacagcatataaacgccaccccatatctagtgcgttagagatgatgacattgcgttccataattatcattcaacccatgtggaaatgctcccaaagttctattgcaatggaacaccaaattggcrtaaaccatatattgagtcagagattatgacatccatattttagtgcacacaaagtggcataaaccatgtagcagccaaagttctgctattagtcacatgatggatttcctacgcaaaggaacattaaaaatagatcaccaccgtacaccatgaatcaccttatgttggctgtgaagataatcagcatgagtagccacggg

SEQ ID NO: 255 - DNA, 401 bp, Glycine max
attcctatacaygttggtacttatatatccatacctgtattcrtttatattttacttatgtataagrttaataaaaaatttaattgaaacagacaaacataacattrattcatttaaactcaggtcataaataaagaaaattataaaaataatcatccaacttagtgattgttagagcttrgagttggaggaccaagcagyctcctaagagagaagaagagagcrcgagagaraaytaagggaagaacttttctgatatattaattttagcatagcrttgcagaagcgcttcttacactatataagggctactaagggacaagttcccracarcaataacaagaaaatacacaaatccargraatatcctaacagaatgatattcccttattcmctgctac

SEQ ID NO: 256 - DNA, 401 bp, Glycine max
caactaactgattgtccttcacccaatcacatacagggagggatccaaacaaaacaaaactagactggccaacaaggamgaaaatttgtcttggcatagctaaagctttggcttatcttcattaagagtccagaataaaaatcatacaatagggatatawatgcaagtaatgtattcttagaccttctctgcttcaacaayggcatmgccatcctctcctttgaatatgactgcrtcatgcacttcactaccctctccacttccctttccgttcccattttgttcacccctggttccttgattctcttgtccggaaaagcaccctaccattggaaacaccagattaattgcacaccggagtttcagatatggcacagtcaaccattgactcaatccaaacg

SEQ ID NO: 257 - DNA, 401 bp, Glycine max
ctcaacacccatttatgagggcgagccctggtgcagccgtaaagttgtgccttggtgacttgttggtcatgggttcgaatccggaaacagcctctttgcatatgcaagggtaagactgcgtacaacatccctcccccataccttcgcatagcgaagagcctccgggcaatggggtacgaagtttttatctcaacacccatytaygcactccaatctgcaagcacacgaccaraaagaggtaaggggcacgaaagagaaagtacctccaaggccataactgcrtcgaatgttcttccttcttcaactagcttctctgatcaatcaatttaaaaattgttggtgagktgtaaaatacagtgcataataccygaaaacataaggacaattygaaatgaactaga

SEQ ID NO: 258 - DNA, 401 bp, Glycine max
gcaccccattttggaccaaattgatcattaatgtttgcctcctcaaatcacacctccataartcaaacatttagtaacaaattagtccaccttmtaaattacacttacgttatcgacatcattgtcataaaccacgamaactttgtcaatgtctttgagtgyaactaggtcatctgcatcgtcatgatgacmtatcgcgayatcaatgtcamaccaaaaaagcttagttgtaagtayactgagatctacatggccctcaacatcgtcctccagagcgttaacaacacctgccttgtcaccatgctcgcaaccatggacaacgagagcattgccaagatgttccaagtgccatgytagttacatttgtatcatgtgtgaacgaaggttaacaaaaatagtga

SEQ ID NO: 259 - DNA, 401 bp, Glycine max
atgataaatccatgtgttggaagtgaaagccacrtgttggactaggtatgtgtggaccaaattgtcaattggagtatgtgtgtgtttttaccttttattaattcaccatttatcctcttcctttttacattttgtgagaaagatgttgaattgtgggtgctaagtttgctttgctctttcctgcctttgcatcatcggtgyctgtgacgacttaacgacagatggtggtgtttggttggtggccrctgttttygtttgattttttcctgtgcgttgacggtgaaagacaactttataaggtaagatgttttttgtttgactagactttattgatgacctccattctcgtaacawttctccatgtgacagtcatttttgttagatttcttcctwtttttttt

SEQ ID NO: 260 - DNA, 401 bp, Glycine max
ggtatgtgtggaccaaattgtcaattggagtatgtgtgtgtttttaccttttattaattcaccatttatcctcttcctttttacattttgtgagaaagatgttgaattgtgggtgctaagtttgctttgctctttcctgcctttgcatcatcggtgyctgtgacgacttaacgacagatggtggtgtttggttggtggccrctgttttygtttgattttttcctgtgcgttgacggtgaaagacaactttataaggtaagatgttttttgtttgactagactttattgatgacctccattctcgtaacawttctccatgtgacagtcatttttgttagatttcttcctwttttttttgttattgwagacaaacaagggattaaacatgtgttagrgtttag

SEQ ID NO: 261 - DNA, 401 bp, Glycine max
gatactcgcacccagcragcaacacgcrccaagtgaacaaaaagcagaacacgctaagcgagaatcacatgctaagcgcgcgatccaacataagtagcacgcgctaagcaagaggaggttgctaagcgcacgatttgaacgcattaagcgcaggctgtcgygctgagcgagcccacgaaggyccaaagcctacttcagcarctataaataaagagtcagtccaaggggaacgacaaaycgagtctcagagtactctcattactacctaaagcctgagaactcttcatctcttttctctttttgtatccattctttctttttcccctctcattgtaaagctctcatggycatgagtggttaatcccctaactagggtctgacaggcctaaaaarccaagcaa

SEQ ID NO: 262 - DNA, 401 bp, Glycine max
tattttataaaaataaatcatagaaattcaaaaattatttattccagcattatccagctcactttaaaaccaattaatgataatataatttattaaaaaatgttattcaaagaactacttataagttgtttattcaaataaaaataaacaagtcaattaataaaaataataatagattggttctataccagattggcgtcwcctccgccgaaaaatgtcgatcccacgcaatctgcaacaattacaatggttcatatatagatgttgtcataaacwttccaacaaaaaatgagctcattttaaggatgatttaagagttaaatttatctttgtataactttgagtcaaaccagttaaatatgtaagttttttatgtcctatcagtgtgaagatttttatat

SEQ ID NO: 263 - DNA, 401 bp, Glycine max
aatgataatataatttattaaaaaatgttattcaaagaactacttataagttgtttattcaaataaaaataaacaagtcaattaataaaaataataatagattggttctataccagattggcgtcwcctccgccgaaaaatgtcgatcccacgcaatctgcaacaattacaatggttcatatatagatgttgtcataaacwttccaacaaaaaatgagctcattttaaggatgatttaagagttaaatttatctttgtataactttgagtcaaaccagttaaatatgtaagttttttatgtcctatcagtgtgaagatttttatataccatctcctactaaaataataacttaagtatgaaaaaaaaacataaaaagatcagattgaattawttaaaatta

SEQ ID NO: 264 - DNA, 401 bp, Glycine max
gagattattatgttggacctagaagaagacaaatgaagctgaaaatagtaagttttggtatttattattttcagtatgattatatacactgaaattcattcatatgtacttgtcccacactcaacagttttccttaccgaactagctactacgaaacagttaacagtaaaagaaaaaagaaaacattacgaaccaaaagtwaaaaaggaatcggaaaagaaaaattaccaaaggtggagcacaccgcagaagattccagcaccaaaaccgccactctcacaaagctgagcagcaatacgattccgagcaccaccaccatccggttggaaatccggcgagcggcracggtgtaggcaggagcagtggtcttggcggatccttttccagcgacgactctcttt

SEQ ID NO: 265 - DNA, 401 bp, Glycine max
agctactacgaaacagttaacagtaaaagaaaaaagaaaacattacgaaccaaaagtwaaaaaggaatcggaaaagaaaaattaccaaaggtggagcacaccgcagaagattccagcaccaaaaccgccactctcacaaagctgagcagcaatacgattccgagcaccaccaccatccggttggaaatccggcgagcggcracggtgtaggcaggagcagtggtcttggcggatccttttccagcgacgactctctttatcccctttgcagatacatagaacttcatcttgtgaattccattccctataagctatatctagctagctttctctccgatcgaatcggcacaggatctgagtcacgaagagagtgtgtgttgcattcgtgtttggatcggttt

SEQ ID NO: 266 - DNA, 401 bp, Glycine max
tttatatattatacactttttattagattttttcaagttgtttcttgtattaatttttttaactaaaatacycttaatttataataaatattataaattaatccgagycattaaataaatagtamtaatatattatgctaaaaataactcggatgtactcctataatgattaacagcatttttaatagcagtaaaaaatarcatttttagtaaaaacttatacttttaattttttattgatattctaaaaaaatrtttaaaaacttttaatattgtactatcttttggaaatctaaggttttaaatgactatttacaaacaagtactaccactgtaccactttcactcgttttttttaaagaaattaatgttgaagtcggtgattctgtctccaacctcca

SEQ ID NO: 267 - DNA, 401 bp, Glycine max
atcaacccttcttgcagcatgttgaagcgtggatacaaaccaaagccatggagtggagctcagaattgccgggtttctrtgttcctcatgttttttacattggttctaatgttagtggttttccttttagtatttcgttatgacagtgatggtgctaatcccattttagcttatgaacttcctaaacaaaaatggaatagytttgactctttggtgcatttgcatccaacaaaagagttccggaatgaaactgatttgatatggcaagtgcctgaatcacctaaaggtgttctctttctggctcatggatgcaatggcagggccatcaacttctgggacaagtcccctaaatgccctgattgcattggtttgcctgaggaacggttgcttgtactccatgg

SEQ ID NO: 268 - DNA, 401 bp, Glycine max
tgcaaattcaatatttatgtaataatcattttgcatgaaaaaatatattgaactaaggcagttgaaaaaaaaaaragagagagaaaagggaccctaatgtcgaatattacaagtgtgagtcattccgaactaaatgacaatggcagagggtaggtgagtttactaaaaaaaatgttgggagagtagtggataatacgagtrgtgtttccccccatttttttgccggcaagattacaagctgtcctcacattttgctattactcgagcatcgattttgaatttttatattacaaatttgtttamgtatactctgtttactaaattttttasaagtatttatagcaactcctttcatggaattataacagattgtttagcaatagagttgcccatgaattagc

SEQ ID NO: 269 - DNA, 401 bp, Glycine max
atttttaggttggtaagttatctacaatctgcatcatggaaggtgttattctgagaagggtcattccttcggataacagttgcctyttcaatgctgttgggtaagctaagcaatggaatacaacccctttttttttggaattactgctacttgtacaaatcattccacttgtgatgctctttctccttccttttttttgtktttaattgtttcagctatgttatggatcatgacaaaaagaaagctgctgagttgagacaggtaatttttttcttgtatttagtttatttgtgaatttgcttctagtgccaaggggtgcttcatttctggctggtcaacttttgcctcaagatatgtttttatttttttatttttggagtgaaacatgtttttggtccctc

SEQ ID NO: 270 - DNA, 401 bp, Glycine max
tttatttttttatttttggagtgaaacatgtttttggtccctcaaaatatatcgagattcagttttaatcccacaaaatatagagattaataygtttttagcccctacattttaacaaaaatttcaaagttaaatatatgatcttttctactagaaaaatctcatttttcaaacttgaggtatcaaacacaataaactaawgatttggactagtgaaaccatatcgtagtagtgttatttatggcgggtggcagaacatggccgaagggtaaaattccgccatgtaaacacaccatagtgggcttctcttcacaaattgcctatggtggttggcaaaaaatctgccatgccattccaccatggcggccatgacacctcctttaacaacattgtatcgtaga

SEQ ID NO: 271 - DNA, 401 bp, Glycine max
actggattcttgactcagagaagtggggaggttagttggcctatgtttttcgtaatcaaggctattttaaataaaawtttagatggaaatagttaccaattttcactatacaaattggaactgctacttttggtgttactgtggtgagtgcatgaatgtgtaacctcaagtgtggaaaattcatttttatttggaacttgraaggtgatgaaacttactcaaagatrggttgatttaacatctgagtttttaataaactttgctaagataaatatattatggagtatatacgagtaaaatatattattttcctgaaacataaagaggcataaagtwttaattaaaatttgggaaattttatttaaacatctggatacccagagaatcttctgwgacaattg

SEQ ID NO: 272 - DNA, 401 bp, Glycine max
aatattgtcatatttagatgattgaattgcatcaatcttcatttttggattctttatatatcagatttgttgygaatatctgtacgtaaaaggtcttttttttgggcatgtattttgaggtttgactttcagaggacttgggatgcatttggaattggattggggaaatattttctattttcagtaataattacaaaattsacctcaattcatgtttttatgtgctaacatttaaaaacaaaataaagtgaaactaatgacatttttgtaattgttagtgcaaacagaagacatttttgyaaatccagtgyaccttttatcaatttagaacaagaacaaagtagtgaatgtgccgcaaagctgttactatatatacatagactgataagttgaaaacttca

SEQ ID NO: 273 - DNA, 401 bp, Glycine max
ttgtgaacatttcaggaggcagtggagcatgcacaagcaactggtcatgttaacttccaagagtatagatgatgcactctgttcgtttgaatgagatacaaattcatgtgtaatctccgttgatttgaatgagcatcattgatgaaaggtagttgctttgttgcagaccataaaactgaataatttctgcatgagaattgytgtggcaayttgggttgtaatattagttccttggtctcgttccacaratgactgtsattataagaaactcacctctagtggcagactagataaagaaactaattagtaatcaattgttttttatattcttttcctggtaaakatttttatctaatatatttcacttattttcctkttataatttttagtgtaataactac

SEQ ID NO: 274 - DNA, 401 bp, Glycine max
ctgtsattataagaaactcacctctagtggcagactagataaagaaactaattagtaatcaattgttttttatattcttttcctggtaaakatttttatctaatatatttcacttattttcctkttataatttttagtgtaataactacgtraactcgcgccactattttaaccttggcgattgttgaatgcttttgataytatatataaatcccttttaatgatagtatataatgactctcaaaacaaatttacaratacttgttctagccgtcaagcttattgttaatcatgaatttcaaatgttgatttatgttggaagaaaataggtattgttattaataaaaacaatgaaaaattaagttgtaagttcaawgtatttatataagaaaagaatatct

SEQ ID NO: 275 - DNA, 401 bp, Glycine max
ctaactctaaagaacawatgaaaatcttttttattccaaaaatcttttgtcttcattaaatgctatagcaattatattgcttccatagtttrcctcctaggcataaatctaaattgtttttagtaatatgagtttttttgttcttaatcttccctcaatcayctttttctcataacttcatcttggtcgccaataatttgyataatcttttttatataaatattcttacaaataggtgttagagtatcaatgcttcactcttctagcattttcttgggcctcatactcataaccwtgttaaacaatttatttattttttattagaaatgtgccaatagaaatcttacaataaaaggcataattttggtcctcgtcccttgtgtttaacctgataraaattc

SEQ ID NO: 276 - DNA, 401 bp, Glycine max
tcctaggcataaatctaaattgtttttagtaatatgagtttttttgttcttaatcttccctcaatcayctttttctcataacttcatcttggtcgccaataatttgyataatcttttttatataaatattcttacaaataggtgttagagtatcaatgcttcactcttctagcattttcttgggcctcatactcataaccwtgttaaacaatttatttattttttattagaaatgtgccaatagaaatcttacaataaaaggcataattttggtcctcgtcccttgtgtttaacctgataraaattcatgtacttcctcaaataacttctaaaagtaatttttctgtctttctataatgtcttgtactcttgttccataacaaaaacagagattttattgt

SEQ ID NO: 277 - DNA, 401 bp, Glycine max
catggcaaaagaatcattcttcacaatagataaatcaagattcgaatttttattagaaaaaatatattgtttgttgtggattattatctcttaaaagttatacatataagaaagacaatcaaacaatttaattgaaattatttttatatttttcatagaacaaaaacaaaaccttatgtttatgatggaaggattccattytcaactccttcayctccactttgccaaccaacttcaarcaattgcccattttgttttgtgactttgcgaattgcgatgatggaaagtaagagctaggtggctaatatgatattacctatatatagagagagagagataggaaatgaaaaacactgcttaaattaaatgagaaaatcggaaaggtcaaacctaagtagtgc

SEQ ID NO: 278 - DNA, 401 bp, Glycine max
tcattcttcacaatagataaatcaagattcgaatttttattagaaaaaatatattgtttgttgtggattattatctcttaaaagttatacatataagaaagacaatcaaacaatttaattgaaattatttttatatttttcatagaacaaaaacaaaaccttatgtttatgatggaaggattccattytcaactccttcayctccactttgccaaccaacttcaarcaattgcccattttgttttgtgactttgcgaattgcgatgatggaaagtaagagctaggtggctaatatgatattacctatatatagagagagagagataggaaatgaaaaacactgcttaaattaaatgagaaaatcggaaaggtcaaacctaagtagtgccacttaggatttc

SEQ ID NO: 279 - DNA, 401 bp, Glycine max
aactgtgtcatacatgttttgttttccatgcattactgaagattamgattaagagtatgtttggaaatctgaatgttcgaccacatcttagacattactaattatatgcataagwtttatcagattattttcaggagyaaaaggtggtgaaaaaaaaccgaaaaagctgtgtaaaagataatttgttaattgccaacgtgrccttttctggtyggaatttgatcatatacaatattcatattcatttgggtaatttttttagtgagcaaattcaattttgcaggagataaaattgattttagaagaaatataattttgttaarccttttgttatttwcttgactttcacaaacaatgtttgagataattaataaataattgaattttttaattatgtctgt

SEQ ID NO: 280 - DNA, 401 bp, Glycine max
ggagataaaattgattttagaagaaatataattttgttaarccttttgttatttwcttgactttcacaaacaatgtttgagataattaataaataattgaattttttaattatgtctgtagaagtttaattttttactgtatatatgaaaatattttatagaagaaaaataagcatacgttaaccattttttttgctgaamaaaattataactatcggtaattatmatttcttttagaattatattattcatataaamaacttttaaaatagcttctataatatgtttttttctttcacattcatttttaccatatatgctgaaaataaaaatagtataactatgttgtattttcttaattatataaatataatctatctttctaacgaaaaattgcacct

SEQ ID NO: 281 - DNA, 401 bp, Glycine max
ttgcacctgagtcctgacacgtacatagtctattattttatcaatgctgattatggacatgaagtccccactgaacgtgggctcttgttatttccaattttccatgcatgtacgtacatcgtgatcctgcatcaactggtatttttcacattatatattttgataatactataatataataatcagaaaaaaatgtctatrttgtttgataaaagcaacaataacctaaaagtttatatagcaaagcacttgaacgattttatgtttacatcaattaattttattgttcaaaacaactactcaggttacgtacaaaaaaaactattaatgttaattaaagataaagagaataywtttttgagagtaagataaagagaatacttaattaataagtttatgag

SEQ ID NO: 282 - DNA, 401 bp, Glycine max
atatattttgataatactataatataataatcagaaaaaaatgtctatrttgtttgataaaagcaacaataacctaaaagtttatatagcaaagcacttgaacgattttatgtttacatcaattaattttattgttcaaaacaactactcaggttacgtacaaaaaaaactattaatgttaattaaagataaagagaataywtttttgagagtaagataaagagaatacttaattaataagtttatgagtgtgtgataaacatcaaagaatattacccgtgatgaggggaaacaaaaagatcttaacctgtcttatttcattcacatatttatacaaataaatgaaagataataacggaaataaattaaagtccatttttataaatatttacaatatcttc

SEQ ID NO: 283 - DNA, 401 bp, Glycine max
tatattttgataatactataatataataatcagaaaaaaatgtctatrttgtttgataaaagcaacaataacctaaaagtttatatagcaaagcacttgaacgattttatgtttacatcaattaattttattgttcaaaacaactactcaggttacgtacaaaaaaaactattaatgttaattaaagataaagagaataywtttttgagagtaagataaagagaatacttaattaataagtttatgagtgtgtgataaacatcaaagaatattacccgtgatgaggggaaacaaaaagatcttaacctgtcttatttcattcacatatttatacaaataaatgaaagataataacggaaataaattaaagtccatttttataaatatttacaatatcttct

SEQ ID NO: 284 - DNA, 401 bp, Glycine max
taattctgcattgaagtsataccaaacaaaaataaaaaataaagttatcacttattatgccacttttagggggttggctgattaaaataagtagtattaataaatttccaagcccatgtgagtgcttatttttwwaaaaaaatatggagcgcacgttttgtatttatggacgtgacagtctctttggttgccacgtggagyctccctcggatgcctttttgtgtagggcaaatggtgaagtgtgcaagcaacaaatagatcagacagtgcacaacacgaccgactcctcgcgcgtgatcaattttcaaataaacatgtctaacgtkggaaagaattactgtccgttagatctatcatatatctcaaaatcacttaaatccaattatcacagttgcttacgc

SEQ ID NO: 285 - DNA, 401 bp, Glycine max
atgtcaaacaaacatgctgtgtagtaatattggcttgtatgaactcattcttttgtgcttttttgaaagtaagttgggactttagttgggtcttccttttatatgagattctgttatttgttrtctgtacatttattattgtcttygtttgtagatcaatgtagctggtttacaatattaatttcatagrtttccatttckcattactgatcactgatgtcacttatctgcagcatggaattggtcacccagggctccagtttcttggtcatcctaatggcatgacccatggttctgatctgaagaagaattcatctcaaagtccccgttccatatttggtacaaggaatggacacttctgtgaggtatgatttttcttactacttcaatatcaatataat

SEQ ID NO: 286 - DNA, 401 bp, Glycine max
aaagttttacccttacatttacttgagtcatgacagragtcattaaaattaaaaatcaattcttcaatgactataaaacagctttttctcattttgatatattcaatactttcatatttacatggcaaaatttaaggctctagtttttgaagaaggaacacctcacagtaaagatatgaaaaagaagaaaaaaaggatcaygcaatgaacaattatctattttagcagatgagatgtgtgaccgcttatacaatttaattgaatcagagaagccagtkatgtctacatctcattaagatattgaacatgtaccttactcctcgtttcrtaaatataagactccaacgaattcttcctgtctttggtcagctcaattgttctgtcctgatcagctaactgga

SEQ ID NO: 287 - DNA, 401 bp, Glycine max
ttgcagtgcaatcatggatcaaccgcaaaggcttcaacccaacaattgctgctgcatcgagatatgcttgtctctgcaagttggtaaagtatgacggaaccccaataacgcagtcagaaactgyggtcccaaaatccttttcagctatagtcttcaagtgagcaaagagcattgctactatttgaaccggggtaaatgcaygaatctccttcaagtatttcaagcgaatcagaatgccaccatccgggccttccgaagtttcaactgggagcarttttaaatcattctgaacatcagggtccgtaaatctcctgcctattagtctcttcacttgagatattgtggacttggggtgcatcatagcagaaacagcaccagctgaccctataaaccgttgcttc

SEQ ID NO: 288 - DNA, 401 bp, Glycine max
graggggtytgaaaataaagaataacatgaaccaagatatacatgctagccaacttatctttcaaggattttrtctattttttatttatgaaaataaaaaaatatgtatcaagagatttacaataattgattcattcttctcarttatttgaawtaaatccttatatatgtatcactcatgcaatgagggtgtttgcacamaaaaaactwgctaacctcttacctaatcctactcataaaaaattgttcatttgtaaccgtcacttggatccgatgttaagctacatattaatgtccatttatgccaagacatctcatgcaatgtgtgttttttmacatttgaataggctttgcatgagtcgagaccaatattattcattttatttttttgctaggcaaag

SEQ ID NO: 289 - DNA, 401 bp, Glycine max
tgaaaataaagaataacatgaaccaagatatacatgctagccaacttatctttcaaggattttrtctattttttatttatgaaaataaaaaaatatgtatcaagagatttacaataattgattcattcttctcarttatttgaawtaaatccttatatatgtatcactcatgcaatgagggtgtttgcacamaaaaaactwgctaacctcttacctaatcctactcataaaaaattgttcatttgtaaccgtcacttggatccgatgttaagctacatattaatgtccatttatgccaagacatctcatgcaatgtgtgttttttmacatttgaataggctttgcatgagtcgagaccaatattattcattttatttttttgctaggcaaagatgattaat

SEQ ID NO: 290 - DNA, 401 bp, Glycine max
ttccaagcaagttctaatccaaccaattcaccttgcacaaaatccaagtatttccctcatctcatacaaaaaaactccacaatraatyataagccttctcatggtcaactttaaggatcatgcactccttcttacaccttttagccttctccgccacctcatttgccacaacaacaccatcaagcatgctccttcctcctrrtaaaagcccccttacctctmatcaatgtattgagtaccccttccaacttccttgrtaacacctttgcaatagtcttatagatacatccaattaacaaaatgtgtccatactcaccaagaccttgaggatcactrataagaatatgctcaagtactttttatattgtaaattatgatgatatatagtaaaattattaatt

SEQ ID NO: 291 - DNA, 401 bp, Glycine max
tatgattatggaaaggggctaccctagtcttctrgtttcaaaattgctgaggcaaattgatacttgaatataacaccttatgaggtggctaatagaaaaagaaattcaaactygttcttaccattcttgtggagctttgaatttcttcctccattcttgtttaccaatttggttctttcctatgcagaccagcaactcgtrtattgaagaaaaagaaactcaagattaatgtacacaggccacttgggactagggttgtatttgatgatgagggccacacacttcctccactagccaggatagcggacacacagagtggcaaagaaatgttgctcgatccaggtatgtccatacttttcaactgcaaactgaagttgatggtgaaattgttgcttgtagat

SEQ ID NO: 292 - DNA, 401 bp, Glycine max
atgaactgtttaatttgaaatccgttcatttaaatttgactttgttaacaaggaataacgttgtgggtacggtgtttaggctttgttaagagtktgcagttctgtttttttgttgtgtggcaattacttttgtgcagatttactttgataattattagaaagaaaatgaaaattgtgtctgaatgaactaaaaggccttgyacttttgtaggtacgaatatgaatttattgacaaaatcgtggaaatggccagtaaaatttaaaatggcttaaatcgrtcaggtcctcgctcaagtgtcaactagaaggaaatatagactraagtgccgtggaaggcagaactaatcaattcaacagattacaaatggttctatgarcagtcataagctcacagattgata

SEQ ID NO: 293 - DNA, 401 bp, Glycine max
aaaaagtaaagtgmtaattgatcatgaaaaccamtttaaaataaaagagtgcaaaagaaaataaagtgtgcaaataaaaagatattgaaaattaaaagaataaagggtttcgaaaagaaattgagattgaaagaagatcgaagtttaaggaaaactacaacaaatgtaaaagaaagcatagggggatggggggattcatcmattataagatcaatgcgagaaacattttttataacataggaattgagctgagaccaattttgccttaagtacataaaatacaattttcccttagttctttatctccaaatcgtatctctatcttatctttatcccatattaatattttttttacttaaataactttttttattttttaaatatatggtcatttttactta

SEQ ID NO: 294 - DNA, 401 bp, Glycine max
tgaactgtagacaacaaataataaaaasaaatacaatgaaataataaagcctaaaagcaaaatagaagagatacracaatgatataataaagcttaaaagcaaaatagaagagatacgacaatgatataataaagcttaaacaygaggtgtcaaaaactcaattaaaaaaaaacaattttcaaaattaatgaattgataargcttaaaaatgaaagagatacaaagaaaaaaaatagaatacttttcaaaatataggactacaagagtcttggattaaayttctctggagaatgtartatgatattaaaaaaatatcaaatttaaaataaatcaatttaatcctcttttttttttttttwactttttcttctctctttcctattacaaatattcctcttaa

SEQ ID NO: 295 - DNA, 401 bp, Glycine max
ggaaatcacattgaaaactaacttctgatttaaatactgtgaccaaattgtacaagtctcaactgtcayaagtggttgacatatttacagtggttcaaaacacaatttttgtatctacattaatatacacgtacataatttaatacaaacaaaaagctaaactgttcttctgagaatacaaaatatacccaaaatatttasaaacccaaataaagtgttgtttgactaaattcaaagcatgcttatttcaaagaacattttctaaatcaaacaataacaagctaactaaatactgacttaccgatggctctctgtaagcttatttaccatgccatagaatgatatggccctatcaatgcttccgctggatgcagtttcatccacttcagattctgmccact

SEQ ID NO: 296 - DNA, 401 bp, Glycine max
aaagattagaacatttkctaatatatatatatatatataaaagcacrcaacactaatgccattgctatcacaataggaaaccaaaaacagcatctcaacattaaacctacaaagaaaaaacaaaatatgacatatattctacaaagaatattccagttcatgttttgataatgaatattgtaggatagttgtctaaattcyagtcacacctctttgggggttgycttaattgcaacctcaagggtggtgatttagtcccacgtcaactagatatgtggttaaatagaacttatgaagcttgggcagtcctcaccttacaagccagttttgtcaggttgaattagggccctaagtccaatttctgataaatatgttcatctaaaaaaaacaagtstttatag

SEQ ID NO: 297 - DNA, 401 bp, Glycine max
agaatctaattacatttatgccatcacaatgattttataaagtgtgaatactaactgagttctaaacagatatcrgtatctggtgaatttaggcggataacatctttccccttcctcctctcatttaggttttgtttctccatgttgttttgttaacaattaactctatttcacakcatcatcattaagtggttggaaaawgggtaactttggcactgtcagtttctgctgaggtatctgtgatcattaatggtccagcttggtgcttgcagtgtctcttggcttgaagttgaaaccagcaagcatgaacagccatgattctgtccaaaagttctcggggaacatgctctcccctactttcttgaggagagactctagcaatatgcaatgtgcataatgtc

SEQ ID NO: 298 - DNA, 401 bp, Glycine max
aacagccatgattctgtccaaaagttctcggggaacatgctctcccctactttcttgaggagagactctagcaatatgcaatgtgcataatgtcttcattcagtgtaaacatgtagcagtagtaacactacaaactgcaaaattgtcttgattctaaagacatcattcagtgcattgtccaatcttaaaaatagaattgtrctaaaacatcgatacaaattcccaccctcttagcatagttcaatttcaatcagtaactgattgctttatctgagmctgctcctgtccttgttcagcagatgtggcacagcaataatctgtaaagtttcaataaactcattggagtggagttctccatgcataacattatacagataayccactgggattcccatgttgtg

SEQ ID NO: 299 - DNA, 401 bp, Glycine max
attcccaccctcttagcatagttcaatttcaatcagtaactgattgctttatctgagmctgctcctgtccttgttcagcagatgtggcacagcaataatctgtaaagtttcaataaactcattggagtggagttctccatgcataacattatacagataayccactgggattcccatgttgtgttttgcatacagggaaakgatatggaggcaaaaaaaactcttacaagtttcatggttcataatttattgtaaatagattctattttgggttgaagcaacttcttcgagttgttcaatcaaaagaagaaaggacctcaacaggaaaagtgtttgctcagtctctcctctttacagcgcctctgatctccaaccatggactcaaaagtatccaagagacc

SEQ ID NO: 300 - DNA, 401 bp, Glycine max
accaaaatgagaaaaaaatatttattacttaaaaaaaaataagcacaaagtgtcacttaggataacaccttatcttaggtgataacccataacatataaataattttaaaactactctatttagtttttttttaaaacctacttttctaaaagagttttcttgagtaaatttacatgtgagtatcttaaaaataatatggrattttgtgatcactataaatkattttatatatttgatgatattcaaattgagttttttaaggatcttcgattagatacgtccttrgaccaaataggtgtcattgtaacttattaagatttaataaaaaaactttttttataaaatgaattttcttaaaaaaatctaaaacaaaagtttaaaaaaatgagactgtagattc

SEQ ID NO: 301 - DNA, 401 bp, Glycine max
ttatactaaattactaccaatatatataggatcaatgagtatctctgtgtttatactgggaatgtatgtctgttactctgtattcatctgataagytatgatgtcaaaggtctagcttagttggttgagcaaaggggcgtgagttgttgtaaacctcctgacattgtcttcaattcttatgaataaaaaaaaaatctgayragctatgatcactgaattaattatggttcatattagccggagtaattttctatgcttttttctaatttgtatactgtgaaacagtttgtgcagccatactaacttgggtcatggggcagcgatatttggaaacatccaagattatgcctgctggtcttgttgctggaatcaggtaatcaaaggattgattagaagtaccc

SEQ ID NO: 302 - DNA, 401 bp, Glycine max
ctgtgtgtattatttaaattcctagtttccacatttaggagatttcagtattaattataatacattttctgatcaagaaataaaattatttctcctttttcaagtgtgggtgtgtgtattggagcaagaaacaagattgcagcatactttagttccaagtcgtttgttcaaggcttcattccacatatttgctgcatattyaggttgaagttgactccaaattgtcataacgcaagcaacctgcagagcaacaaagtaaatgctcattcataaaacattaagctatgtagcatrtggctaaaacataaaaaaaaagacagaaagggcagaagatagagaaaacaaactatcaaaaattgataccacattcatcactttwattttttatgtgaaagaacatt

SEQ ID NO: 303 - DNA, 401 bp, Glycine max
ccagttttggttaaggtattttctgtcaaaaartatacttgattttgttatggtaagatgaattatttrtatttgtttttttgttaaaaacatgacatagtgtaaacaaattaatgaaattgycattgtaataataatatgaattgtactatttataatgtaagaaaaagtagatatttaatacctttacctttttaaaawgttgaattcaatacaaaaattgaaatctatagtgacattctttgaatgacattttctcttgtycaaattcagacctctgccaacttcaactttatattcagcctgtgaacaaacaaaagactactrcasaatttttccaaatttgtttctaacaatatgatccttcstaacagagaaaccaacaaccttagcatactaca

SEQ ID NO: 304 - DNA, 401 bp, Glycine max
tatttrtatttgtttttttgttaaaaacatgacatagtgtaaacaaattaatgaaattgycattgtaataataatatgaattgtactatttataatgtaagaaaaagtagatatttaatacctttacctttttaaaawgttgaattcaatacaaaaattgaaatctatagtgacattctttgaatgacattttctcttgtycaaattcagacctctgccaacttcaactttatattcagcctgtgaacaaacaaaagactactrcasaatttttccaaatttgtttctaacaatatgatccttcstaacagagaaaccaacaaccttagcatactacaataaaattgataygctatctycaaatcacagaaattcaactgtrctacatctccagtcatctt

SEQ ID NO: 305 - DNA, 401 bp, Glycine max
acaaaaattgaaatctatagtgacattctttgaatgacattttctcttgtycaaattcagacctctgccaacttcaactttatattcagcctgtgaacaaacaaaagactactrcasaatttttccaaatttgtttctaacaatatgatccttcstaacagagaaaccaacaaccttagcatactacaataaaattgataygctatctycaaatcacagaaattcaactgtrctacatctccagtcatcttctgcacaaaaaccaccactttttccacatccaatactgtgagaatcataatcctcttccaccytatactcaatcgactcctcatctttctcattgtcattgtcatcatcttcaacctcatcctcttcatcttcatccacaaatacattac

SEQ ID NO: 306 - DNA, 401 bp, Glycine max
tccaaaacctacaaaataacacatttyaaaaaataaataaatatataacttgccaaaratraaaaccattaaatcagagtggcgcagcggaagcgtggtgggcccataacccacaggtccctggatcgaaaccaggctctratataaaagagaaaagcttcccatkccttttttattaatttggatatctccatttttctkcttttctcagcgtatattatttaattcaaatcaawcaaatacrgtcttcctattaatttcaaacgaataacatttattcacaatacatattttatcaattaacttcatcccctttwcttttacctttttcatatttcataaattaaaatataatttttmtttacatttaaaaaattacataatcttttattatcaagcaa

SEQ ID NO: 307 - DNA, 401 bp, Glycine max
atcccctttwcttttacctttttcatatttcataaattaaaatataatttttmtttacatttaaaaaattacataatcttttattatcaagcaaaacatggttttacaatatatttcaaaatatttacatattcttttaccaattaaatttcaatgatattttttattagttacagtttccaaatgcaaatgattgctctkattatgacatttgttaaggaaaaaaagaaaagaaaagtayttattatatttaraacaatttttgttcaatacttaattttttatgaaaaaaaaaatattcagagctgtgggwatgataagacatttcaatttttctataatttattttgatagcttataaacttayttatccaaaattaaaacgttttgcataaaaacaa

SEQ ID NO: 308 - DNA, 401 bp, Glycine max
tgttgattatgaaaatggatttttctaatttaatttcttttagaggatcaataattgattcaaaattttcaaaatgttttgatttttctttctataatagttattttttcatcatatgtctaattatttgaaaattacttcagttaaaatttgattgtgattttgattgataagaagattcatttcattatccatttattktcatattgaatattttacatctttatattaataaaagtaaagaartatcgaaagagattcttatatatttgagcggaattattttatatttttttatcttttaattaaaaaataatttaattatttcaaataagaatatgtacttgtcctaactacatcaattacaatatttatatgactttatgaattaaatagataaa

SEQ ID NO: 309 - DNA, 401 bp, Glycine max
ttatgttgtgacwgtgggagatctacttttcaagtttttatatgattytttttattgttacaattaatatttagttgttgaatatctaagttttatggttgaaaacaaatattataaatgctgttttattttttttttaagttcagttgttaaaattgttaaaacttggaaataagtattatgtattttttatattttaarttgaataattattattcaacttaaaaataattattgttttactttaagtttaattattgaaatttttattgttsgtttatattattaaattaattattattcaagttttattcaattaataataaatttttwaaatwtttttaaatatttattagtataattttaaaactttaaaaataaaaacaaaccaaactataaaa

SEQ ID NO: 310 - DNA, 401 bp, Glycine max
caatartaccaaaataactagtcaaggtacaacataattaaaagaataamaataacctaaaaaaattatcacttaaataaataaaaaacaaaactagcaatattttacaattcaaggatwttttttttttccttttaactcaaatttacacattcccattctttcaaaattcgaaataatcaaattcaccaaaaccttatytttcttccttatttatgtacaaattaaacacraaaaatactttctttccattccttttttttcttcatttcttattgttaacatccaatgatttttttgcwtattattagatgtgattccggacgaaakttgggtttagcataagcttctaatctcacaatatgatgaattaatatttgrattcttattggaagaggtgc

SEQ ID NO: 311 - DNA, 401 bp, Glycine max
aactaagtaggtttcaccgtagaaagatttcatgtgaactagcgatggaataacaaaaaatctaaccggatttttggtgtttaacgtgaaaatcttcttgtacgtggttctgaaaggcaccctaaaccaatggaatttttctactttacttacaataaccccgataatgtgttatgcatgctctatttaggggtgtttatyggtacsatacagtatraatttgaattgacctagaccaattcaaatagtttgagttgagttatttatatatttaggtcaaaattgrattgaatcgatcaaaattrtttatgtacgarctaagttacaagtttagatttatagatccgattaaaatcsaactgaactgaactaataaaattctttagaattgtttgatttga

SEQ ID NO: 312 - DNA, 401 bp, Glycine max
ccgtagaaagatttcatgtgaactagcgatggaataacaaaaaatctaaccggatttttggtgtttaacgtgaaaatcttcttgtacgtggttctgaaaggcaccctaaaccaatggaatttttctactttacttacaataaccccgataatgtgttatgcatgctctatttaggggtgtttatyggtacsatacagtatraatttgaattgacctagaccaattcaaatagtttgagttgagttatttatatatttaggtcaaaattgrattgaatcgatcaaaattrtttatgtacgarctaagttacaagtttagatttatagatccgattaaaatcsaactgaactgaactaataaaattctttagaattgtttgatttgactttaaatactgttaa

SEQ ID NO: 313 - DNA, 401 bp, Glycine max
gtacaaacatcttccaccaaactgtagataggataaccaaatccttyaaatgaatatatattctagagagaagtcaagatctatctcttccattgcgagtgaatcaatttctatgaggtcaaagttcatccacccacaatacttgaaaattttgagatttggtgcattgactttgaaataatcaaaatcaaagccgcattrgtctaggacgagctgtgtcagacccatgtgtttttcttcacctaggtcaaacttgtctgagttccaacaccttttaaaactcaaactctccmgcatgttacaattggaaagcaaggccttgatagcactgagtctcacttccatccaacccaaagaaacttctttgagtgcacsaaaattaaacactttagtctcaataa

SEQ ID NO: 314 - DNA, 401 bp, Glycine max
agtagtctggaaaccattacactgaaagcaggctcagcactcttaatgatatgggtgaatgatacggcaacttttgacatgctaacagttgccgctacatgtcctattgtatgtagaacagcaacctgcggtgaaaaacagcaaacactaaggtcacaatccatatcaagatgttaataaacaaattgaaaagccaaaacsattcaagttcttaattgaattgyggtcacagacacggtctaggtttcatcaggatccttgatattgcggcgaattgcagccacaaaggccccaaaagccttgacattgcggccaaaatcacagtcacaaacaattttcamaaacctttccaaaacttaaatttccatcgttaaaaaaaaaaaaatctctcttgtaaacct

SEQ ID NO: 315 - DNA, 401 bp, Glycine max
atctcacatacaatcatgaaaaggattaagaataaccgttttcaaaattgaaagactaattttwaaaaaaaaaaaaaaaactmaaaaaattggactccaaaattaagagagtaaaataataattaagtctttctttatatatttcatattatcattatatttaaaattaattctcctattttttttctctcaaagtatcawataacataaaatatttatacaagattatcttaacaaaaacgagcaaaaataggatgaaatataataagatagtgaagttaaataaaaaggcatagcatgaatttttgttcagtcttaatatgcatttaaaataatgataaaaaaatatccatttaatatcaacagaatatttaacaagttgtaactaaatatgtatattt

SEQ ID NO: 316 - DNA, 401 bp, Glycine max
caatctcatatcattaattgtggaacgttaactttaatgtcmcacgtcaaaaaatcgttgaacctttaatgttaatttgatactaaaaaattataatttaatattaaartaatccttaaacattacaacataaaagatatatcagttcacaaaatagatgtataaattraagttaaccttctacacaacaatatgatattktgacacacttttttttyatattttcatgaactatttcaaaaaatttgttttttccaggaattaaattatccccccttatatttttarggactaaagtggtcatccgtcctttaaaaaagatgtaagggaaaggttgggtatagtttagtatttttcaaagaaaataagttctgatcttcaataaaagggaggtgaaaata

SEQ ID NO: 317 - DNA, 401 bp, Glycine max
tatcctaacagaatgatattcccttattcmctgctacaaaggcactaccagaargatacgaatcctactacgctcttcatgtacgtgcgatgcatgcagcatgtgtcatagctagccaygtaatycctgttgttgcctcctttttkggtctcacgctttttgcttcwtrcagaccccttacttcctgcagtyccatattaytatccctatcattgatcgttaaaattaatattttaatcacttaacaaaaattctaattaaatgtttagtgttctttactctacggttagagattaaagactaatgtgtgtgtgtttttcagatatatacctgtctcatactcaatcctagtactaycagtaattatttgtcttayttgcagatatttttgcaatattcct

SEQ ID NO: 318 - DNA, 401 bp, Glycine max
cctcgtatgctaaatgtagactaagatgatatagtaaatacaagaacaagaacaatcaatatatctttagtcatacatgaaagaatataatatttggatgctttcaattttcaccrattcaaaatgtcaaamtcggggtggttatcttcaacgtcatcctccaaatacctatctaatttatttttttgcacctcacccttytttttcttcactttttttttwaaaaattcatcatcccaatcatcacccttatcacctttgtcatcattatgttgtgagatcatgtttgaagycgatgtgctagaattgactgaattactactagaatgagaaatggaatgctctrgtacatattgctaaattagtttgtgaataagttctttcaattttttcatcatgtc

SEQ ID NO: 319 - DNA, 401 bp, Glycine max
tacaccgtatatcctcagtgttcttatkaatgttcagttttaacaagctcttccttaaaaaaaaaaaaaatcattaacgttgcaattaattgaattagaatctcctaaaaaaattaattagaaagtcaactttggaaaaaatataagaaaaaagtatctgttagaaagtcaagtttggaaaaatatcagaaaaagtatctrttagaaagtcaatttaaccatytaagcttttatcttaaattatactattagaaaaaatcattaaccgaaaaccgacgttgttccttcctcgctggagtgacgtcaaagatttgaactagtcactctcttacacatacacagaacccgatcccatcctttatcaattaaacsaaaaaatcattacacactctctttttctc

SEQ ID NO: 320 - DNA, 401 bp, Glycine max
tgaatactaatacacaagttctttatactattaattcttaaaacttatgtatgattgagtgttcacaaatcatgaaatattttggatttattatggtttataaattataactttatgtaataataatagtttacttttagatcacattataattgatatttaaagttatatttactatcacccaactataattttatctarcatatttatcttgaaaaaaaaaactctatctryctgaattaaaactgagagtgtttggctgcatcctatgatctggtttaaacatgctaaagataaagaccgtgtgttggagaagttggtaatttgcggtgcacgttactttaaagtttaaacaaacaggtcttaaagtcaaaatgatgcgcgctgcaaggaactgtgtg

SEQ ID NO: 321 - DNA, 401 bp, Glycine max
ttaataatcaaagagtttgtttatccagaagtttggawcgtgattttataattaacgctggaaatatagttttgtatagttccctgaaactttccatggtgaaattgttcttttgtattaaatctacttttacttgaccataaattccatttgaaaacgtctctgccgttttatcttttgtagacacaagatataggcatraacgaagttgcctcaatcttttacaaaaagctttttgatgagggacgagaattataaaaaaactgaaaarccaatggtctgagtaaacttttggggacattcatctttggaatcaagttattgtaaattgtaatgtagcaacagtcatagacaattgaaatcctttcaaaatttctgattggaattgttgaaaggatatg

SEQ ID NO: 322 - DNA, 401 bp, Glycine max
taaaatataaattatatggactaaaaagataactttcaaacggtaggggttaaaagaaaattaaaatayaaattataagaactaaaaaaatcactttcaaaactatagagactaaaagagaattaaaatgtaaagtgtggggcctaaaagagaattaaaatgtaaactatagggactaaaaaaaccactttcaaactatayggaccaaaaaagtaagaatcatgaaactatagagaccaaatgagtaatttaaccaaaaatttaactttatccttttttatttcttttttttgttaattcattttttcttttctttgtayagccttatgaattgacaattcatatgaaccacacgaattgttaaaaaataattaacgtcattatatataacactaaawttt

SEQ ID NO: 323 - DNA, 401 bp, Glycine max
tgaaccactgactttgccattaagatccagttcccataaagaagatatgtcatgttgtactacaacatcatcatccagcaatactaccttgtttagatctggaaacagctgtgatggtccacaaaaaatcagattatgaaacaatcatcaatcatcacttagcattcgtcttgttattactaaaatcttactcgaggtttyaaattacagtcstatagttttgttgaattccttgatattacacaaaaaagtggaataattatcaattttggtraatctcatgtctaaatcatgaaaaagagttattaaatgaaactgttagactcaaacaataataattatcaataaattttaatcaatatagaaaaaatattaaaaaataataacaaagagagtattat

SEQ ID NO: 324 - DNA, 401 bp, Glycine max
tgaggtcttgttttaacgccaacactttcacaagctcgttaaatgacattgctcctccttcattagcattgccatcatttgcctctattagcgctctggtcaactcatctctgagtttcttcatgcacataaatacagtatcrccgtaaaaaacgagaatgaaagtcacgggaacgtaaaaatatgaggaaaaataaataratttctcatttattttttttcatatatctttctttttcctatatataaaatctagaataaattaaaatttcacttaaaacttacaaagttataaataaaatcatttatrtgcttttaccawagtgtttaagctttttcaatcagttttataaggtaatattagagtctctatataatatggtttagaatttaatcaatcc

SEQ ID NO: 325 - DNA, 401 bp, Glycine max
tctgagtttcttcatgcacataaatacagtatcrccgtaaaaaacgagaatgaaagtcacgggaacgtaaaaatatgaggaaaaataaataratttctcatttattttttttcatatatctttctttttcctatatataaaatctagaataaattaaaatttcacttaaaacttacaaagttataaataaaatcatttatrtgcttttaccawagtgtttaagctttttcaatcagttttataaggtaatattagagtctctatataatatggtttagaatttaatcaatccttattctcctcattattctaaataaaaactaaatttcagcacctgcaatttgaaataatcggttcattgtcatgtataaataaaagttcaatttcagcgtaatttaaaa

SEQ ID NO: 326 - DNA, 401 bp, Glycine max
tccttaataaataaaataacctattagcgatataggatttaggggttaattagggaaacattaaaattaaaggtatctttctatagtttataggtatttttcattggagataattttatttgacttaaatattttccattgaattattatagagagtatatagccatgactcaaattagaaataattcattaagttaatcmatccattagatcaatagttaaaaaattaaaggtaatacaaaaataaactagttttttcacccaattctaaaaataaaagcataatatttttaaagataaaaagtacttattaaaataatattatttctaaatattttaattaattttaaattccactacacttttatcttttcttttgttttataatttcacgtttaaac

SEQ ID NO: 327 - DNA, 401 bp, Glycine max
gattttatttttatttttcatttataataagtgaaaatatttaaaaattaaaacaaatattaatacttcctccttctttatatattatacactttttattagattttttcaagttgtttcttgtattaatttttttaactaaaatacycttaatttataataaatattataaattaatccgagycattaaataaatagtamtaatatattatgctaaaaataactcggatgtactcctataatgattaacagcatttttaatagcagtaaaaaatarcatttttagtaaaaacttatacttttaattttttattgatattctaaaaaaatrtttaaaaacttttaatattgtactatcttttggaaatctaaggttttaaatgactatttacaaacaagta

SEQ ID NO: 328 - DNA, 401 bp, Glycine max
ttgaggtttgttgtctttggtgcttctgttacagaacagagaacatgcaacgtccgagtgggcccacaattggcccactaaatagttaggtgctcsctgttctgttgttagcccaatatgagtctgaaaggtgcgrgctgggacccaagatgtcacgtgtcatggcatgtgcgtcacaaatcgtatcaacaagaatgcttmttcattaggatcaagcattttcttttttagtaaaacaactcaaagcatttcattggtaagaatagtcttaatacaagatgatatgtaatgaaaaaaaaaaactagtgactaacatgaaattgtgatatctttcctagaagatgaacaatataatttgcttgtctcctatcaaaatactgaaaacaacagcaggatcaagc

SEQ ID NO: 329 - DNA, 401 bp, Glycine max
agraaaagaaatcctgactaatttaaaatttgattraaaaataartttgataaaaraattatttccatcaatgatcgarttcaagtactacccaaaygatttaaccwtaaytttagcatattaatcacaaatattcaatcacttcattargtgatatargatattttcatatagctgtattttagaaaattattcatctcsaattcatttttatataggtagcaattctagtatccawtattcttatactttatgtataggtagacactcattttcaaattcattatccacattttaattaaataagagtgttattttatattctaattatgaaacataataagcaaaatatttaactaaatttaaatcmagcataccagtggattcaagtccgaaaaaat

SEQ ID NO: 330 - DNA, 401 bp, Glycine max
tgatcgttttgagtgcatataagaggtaatrcccacttaaaaaaaaatcaatttcgatagagttagaagatctttatatttgttcacctcaactaaaaaaatattagaagattagctttgaatatctttaaatagatagagtaatgatatacatacataatctaaatattccatcaatatcttttattttttttctatttmtttcttcatgttataaattctatcatatttataattttgtctcttttttaattctctgtctaagtgtaagatagtattatggatgtttatgaaatatttttcaaaatgggatgcaaagcacccagagaaggtgctaaccatcggcccatraagaccaccaaawtcgcatggtcgttctatccctgtcttagacttttcga

SEQ ID NO: 331 - DNA, 401 bp, Glycine max
ggaaccatcaggtggtcaagaagagtcatcctatgaaagtgccaagcagtcttttcaaccatcaccaagtgttcctgatgctgaaagcactgaaaatccggtgggtgattcacactttatgatagtttcatatagacatttcagtttgtgccaagcaagtgttggttataaggtttgtctttgcaattttatatgcatttrtgtatgcatgtagtgatcatactctttttgttgtgacagaacattgttcctgtggctcaaagggaaaacacctcttggaagagttgctgcggactctttgagattatgaggggtggtgatagataattcaaggtgagtaaacctcaaacaaggattattttttctttggccaataataaatgataaataactgattaatc

SEQ ID NO: 332 - DNA, 401 bp, Glycine max
tttcaggaggcagtggagcatgcacaagcaactggtcatgttaacttccaagagtatagatgatgcactctgttcgtttgaatgagatacaaattcatgtgtaatctccgttgatttgaatgagcatcattgatgaaaggtagttgctttgttgcagaccataaaactgaataatttctgcatgagaattgytgtggcaayttgggttgtaatattagttccttggtctcgttccacaratgactgtsattataagaaactcacctctagtggcagactagataaagaaactaattagtaatcaattgttttttatattcttttcctggtaaakatttttatctaatatatttcacttattttcctkttataatttttagtgtaataactacgtraactcg

SEQ ID NO: 333 - DNA, 401 bp, Glycine max
ttatataagaaaagaatatctaagatactcaatttttcatttatttcatctatgcattttctaaccagaactacatatctaaaaggcatatttaattgtattgacttytggatatactttataaggacatttaagactaaggtrgagataagagctcaaaattaacccttggcccaatcctatggttataagaaattttgwtgtgattccactgtgtaattgtgttctcatcctagtcttgacttcctcatatatatcattgaytgcttgaagatgtgcaacacaaatttctttcttcttaaggccatccacaatatctttcttagtatttgatcatatgccttttctaactctaaagaacawatgaaaatcttttttattccaaaaatcttttgtcttca

SEQ ID NO: 334 - DNA, 401 bp, Glycine max
tgttaaacaatttatttattttttattagaaatgtgccaatagaaatcttacaataaaaggcataattttggtcctcgtcccttgtgtttaacctgataraaattcatgtacttcctcaaataacttctaaaagtaatttttctgtctttctataatgtcttgtactcttgttccataacaaaaacagagattttattgtsttcatccttaatgcacttcttttttatccaagtctcttgactttttctctttaattttagcaagcctgtagagtaactcttgctccacttttgatacctaaggcttggcataatcgaataaaagcttttagttcttgcttcagttcctttttggtacttttcttaactatcacacattttctagttttcagcattctaac

SEQ ID NO: 335 - DNA, 401 bp, Glycine max
gataaattaatagtgcaactcatttcaaaattgccaatgcactgcttctcttcaccccattcaattaatctaccatgctttaattcccatacatgtactattcacagcactgccatccattgtcataatgttttactaattcaaagatgaaccaaatgtgggtaatattaggcaacgtatcttgaaagtggtagcttcccmttgtttgttgaaaaacatatccatttttgttttaataaaaattactcgagggcttccgtttaacgttacttcatacaatatttcaaaartaatgagtcagcttttaggagcmaaaaatggtaaacatagtcaaagtcgattagccataaatgagaaattaaaaaaaaattatttgtaattttttcatccttttcgaagat

SEQ ID NO: 336 - DNA, 401 bp, Glycine max
atgttattctgtcgcaattcccaatttatgaatagcatygggtgcacactgggccagctgtttgcatgagaaaatataaatttatttattggcacaatctttgacccaatacggatatccatttgttggaaattctatgaaattggaatcttatactatactaattgtcttctttttcttcccccaagtgagtgctaatarttaaaccataaatcacttctatatttcataacaaggacttgtttttctctatttctgtctgrttgcatacatgcatgaaagaaagagtatcarctaattgttttatttgaagaaaaaatagtggcgtgcttaagtgttaaattagtgttcaatagtaggcacagttgtatgwgagtctgcarcttgtaaagttgtagtcc

SEQ ID NO: 337 - DNA, 401 bp, Glycine max
attattactttcatatctttatatactcttgaaaattttgtttgtctctttttaaaatctcttttaaattgtctttgcattatattttttatcaaaataattttagttattttataatttktgtacttaataaacaataaatggtacaaagtaataagaaaaattgattttttttctcttgtgagaattggaaaatatgamtaaagatattaataattaaatagatattgagtgaaaagaataagattatgcattttgataattttaagagtaattttaaagaaataatacaaactattaataaatttaacattactaattaaattaactaacttatctaattattgtgaattaattaaagaatcttatattaggtacaaaagtagtagttaattacttaa

SEQ ID NO: 338 - DNA, 401 bp, Glycine max
tgactttcacaaacaatgtttgagataattaataaataattgaattttttaattatgtctgtagaagtttaattttttactgtatatatgaaaatattttatagaagaaaaataagcatacgttaaccattttttttgctgaamaaaattataactatcggtaattatmatttcttttagaattatattattcatataaamaacttttaaaatagcttctataatatgtttttttctttcacattcatttttaccatatatgctgaaaataaaaatagtataactatgttgtattttcttaattatataaatataatctatctttctaacgaaaaattgcacctgagtcctgacacgtacatagtctattattttatcaatgctgattatggacatgaagt

SEQ ID NO: 339 - DNA, 401 bp, Glycine max
aaaattaccatattcactagtgaaaaatattttaaattctgaataatatcattaaatatagygacaacttaattaaaccattaatttttttgaatatttttaaaataaaatttaaatttatgtcactaataattaatatgaaccaattagattgtttttaatgaactatctatttgtttcttacgtgaaaaacaagaaatrgtatttatgttagtttttctatcaagtcttctctgttagctttaacaaaaaaatcatatgttacgctttaagtgtttacgtgacacacatgacacatwtgtatgaactattttaaagagtttagagttagatgtaaaaagtggtaaacccttcaattatattatcttcattgttttgtttgacgaaatcaattttatctt

SEQ ID NO: 340 - DNA, 401 bp, Glycine max
gggccaaaaataaaataaaaaaagcagattgaaccgrtaattaccaatgatttcccttatttgaatttwtctctttcaactccccggaagggggaaaagtgttaaaaaaaaagttcacatttgtcagaagctattaaaaatttaggccttcagttcattcatcgtcttcattgatgattagaagtattctgcttgtcttcrcccttgtcttttggaaatggagaacccttggatttcaatatctgttggcatastctgaaaacccatcaaaatagaacattcattagttttgagataaaatcaatgtatataatgacaatcaagttaaattggagcaaaygaacaatgctttgcttcagaaaggggtataattctgacccaaataaatgatcatagtaccc

SEQ ID NO: 341 - DNA, 401 bp, Glycine max
gtatggcgtatgaaacatggagattggagaaacaaaagtaacctgttttagatcttctagttttgcagaataagcatctacagtttcgtcatcaccatcatcataaagccaatcctcagtcgctttcaggctcctagatatgtccttcctctcatgttcgcttgaaaagcttagatatgtgctgaatagctattcatacawgcaaataaatttaaataccagtacagaatgaaaagtagagcatagacatgaagacagctttaataaaatcaatggtaagaaaaggcataaggattcagcttttaattttatatcctatgcagattttattacaaagtataacagcrgaccatcctcagcttcacaaagttttacccttacatttacttgagtcatgacag

SEQ ID NO: 342 - DNA, 401 bp, Glycine max
atgatagtaacacttttattttctcaaaacaccaacatgaatcatatctgcaatcaaaacaatctccacaagataaaaatgtacatatacaacatcacagacattataaaaaacagttgcaacagactgacagtcaaagacatggtacagattcagtatcagaaataatcagataataaaatttagccataaaattgttcrtgttaaaaggaaaatttgctagaaatctctaatatctgagatatcttccagtaaaaaaaggtgagcaggggggagagacagaacaacatgggagtacttaccaaatggcgtggagcttcacactttttgttgatactatcttctgtgacattttcaactgtctcagaaacaggttcaacattcattgcttcagaatttga

SEQ ID NO: 343 - DNA, 401 bp, Glycine max
ctgataatgccatgcaaatttagttgaactcgaactttaattcttgccttacttccatgggatccatggaaaggatcaatctaaatagaaatgrcaaacaaatgcataagcatccaaaaacaaggtgtaggcataagcatacataacactttttaatcactggcacaaggaatggcagtatctcaatattgagatgtcttrtattatataatagacattagcaaatgttagccaattgtcattgaagatactaaagattaaatatagtcatttctctccatttgagaaacttagacagtagatttatgaatggtgttagatccaccatatctgcttccccttctcctaagaacattatgatttgttcaagcatgtgcacacctacagattctcatattgct

SEQ ID NO: 344 - DNA, 401 bp, Glycine max
crtagagactataccacatgcctttcatgaagcacccaaaagaagcaagaacagagagggtaataattaattaaaaaaattaataacaaagaatcacggacaagatgatctaaactcyttcacatcatagtaaagttctaaagcaggcatactgtgaagcaacttattttaggagatgtcccaggtggtaattcatctggrttagcatagaatgcttccagatggagcaaattactgcactgaaatgttagaattttaacacttggaatgggttggccttttgggaagagtacaccatccgatccttcacaaattggacttccatcacatgaaagtccaatggaaaaaggaatagaatcctggacctgaacaaacacaagaaattacattaattttataga

SEQ ID NO: 345 - DNA, 401 bp, Glycine max
cttccatcacatgaaagtccaatggaaaaaggaatagaatcctggacctgaacaaacacaagaaattacattaattttatagagagcaatacatgctaatgcaaaattctaaaaaaaaaaacaaygatatctatgaagttagatatatttcaattaagatagacaaactaaatgcagaaaataaacctagcacctagktawcaacttggttcatttagtaattattacatttctaacctaagaatctacaaacacaaaaatctactctcctacatatacatatcatatagataggatragaatcaatgttttgtttcaatattcaaacctcatattctttgacacggaaaataggactgagcattgcacactggagagcacaaccacgtgctacacactca

SEQ ID NO: 346 - DNA, 401 bp, Glycine max
ctgcaagttggtaaagtatgacggaaccccaataacgcagtcagaaactgyggtcccaaaatccttttcagctatagtcttcaagtgagcaaagagcattgctactatttgaaccggggtaaatgcaygaatctccttcaagtatttcaagcgaatcagaatgccaccatccgggccttccgaagtttcaactgggagcarttttaaatcattctgaacatcagggtccgtaaatctcctgcctattagtctcttcacttgagatattgtggacttggggtgcatcatagcagaaacagcaccagctgaccctataaaccgttgcttctctccaaagcagaccacaccaggggtttcacgtttggattcatcattcaacaaaacatcaatcacacgttgct

SEQ ID NO: 347 - DNA, 401 bp, Glycine max
cacgttgcttcactgcagcaatcacacagttctcatttccaatatcaatccccactccactcattttaatttactgcgtccttccctcaaactacaaacaactaattcaatccaattcaccctttccacttcaccaacacaacccaaaagtcaaaaacttcacacaaagccggsccacaaacataagcttcacatttcacrcggcgctattactacaaaaagaaaaggtwggaaacatacacatcaaaatgaaaactttatttctgcatcatggaaaggtatagaaaacaatgatatagtgacaataaatgctttgaataaagcaaraaagktatgaagctgaagaaatgctttgaatgtaaaaagaaactycgagagagaagaaaaaratgagataagcc

SEQ ID NO: 348 - DNA, 401 bp, Glycine max
cacttcaccaacacaacccaaaagtcaaaaacttcacacaaagccggsccacaaacataagcttcacatttcacrcggcgctattactacaaaaagaaaaggtwggaaacatacacatcaaaatgaaaactttatttctgcatcatggaaaggtatagaaaacaatgatatagtgacaataaatgctttgaataaagcaaraaagktatgaagctgaagaaatgctttgaatgtaaaaagaaactycgagagagaagaaaaaratgagataagccaaaaggaatagtgagagaaaatggaagaaacctgattttggtgaagcgggtttggagagaaagatgaatggtgaaatggagaagcagttggtgactrcataattcagttgtaatggcagagagaca

SEQ ID NO: 349 - DNA, 401 bp, Glycine max
caccaacacaacccaaaagtcaaaaacttcacacaaagccggsccacaaacataagcttcacatttcacrcggcgctattactacaaaaagaaaaggtwggaaacatacacatcaaaatgaaaactttatttctgcatcatggaaaggtatagaaaacaatgatatagtgacaataaatgctttgaataaagcaaraaagktatgaagctgaagaaatgctttgaatgtaaaaagaaactycgagagagaagaaaaaratgagataagccaaaaggaatagtgagagaaaatggaagaaacctgattttggtgaagcgggtttggagagaaagatgaatggtgaaatggagaagcagttggtgactrcataattcagttgtaatggcagagagacaaaatc

SEQ ID NO: 350 - DNA, 401 bp, Glycine max
ggsccacaaacataagcttcacatttcacrcggcgctattactacaaaaagaaaaggtwggaaacatacacatcaaaatgaaaactttatttctgcatcatggaaaggtatagaaaacaatgatatagtgacaataaatgctttgaataaagcaaraaagktatgaagctgaagaaatgctttgaatgtaaaaagaaactycgagagagaagaaaaaratgagataagccaaaaggaatagtgagagaaaatggaagaaacctgattttggtgaagcgggtttggagagaaagatgaatggtgaaatggagaagcagttggtgactrcataattcagttgtaatggcagagagacaaaatcgccaccgcactcgctcaagccataataccrtctctatccc

SEQ ID NO: 351 - DNA, 401 bp, Glycine max
aaatgcactcacctggtgagatcatccattcagcaaacgagtaattaaacccatccactttaggatacagccatacccatgacttcatactaayagcgtccgagagagcatggaaagatracacacgtgatgcttgttcaatgtaaccgtactagtaagatcctgaaaatttttccacctcctcaccctctcattcaaacyaccttttttcccacttgaaatcccacacccatgtctctccttcccacttacccatacccctaccacgttgtctttttgcaatgaattgtggtacattctattaaattttaacatcagtttttcatctcctaaccaataatccttccaaaagtttaccacatggccatctccaacacaaggtaccacttgygaatcaaatc

SEQ ID NO: 352 - DNA, 401 bp, Glycine max
tcattcaaacyaccttttttcccacttgaaatcccacacccatgtctctccttcccacttacccatacccctaccacgttgtctttttgcaatgaattgtggtacattctattaaattttaacatcagtttttcatctcctaaccaataatccttccaaaagtttaccacatggccatctccaacacaaggtaccacttgygaatcaaatcatcttgtttcctcattatgtccacataccctccccaaatcattccagcaagtggattgtttagaaagagttctacttgatcctaaattttgccatccytcatattttgttctaatgacttcataacacaacccttccccctcattaagcatactccactttcacttygctagtaagggctcattaaatac

SEQ ID NO: 353 - DNA, 401 bp, Glycine max
tgaggaaactgaaaatgatattcttcagttagcggatactgcaaatgaaggcgaagttaagtcatctgaaattgaagaaatmatgtatgttcccgtattcatttttacagtagtacagattaaaaaattaggcygctttctgataatgctgcattagtttctttatatatgattatggaaaggggctaccctagtcttctrgtttcaaaattgctgaggcaaattgatacttgaatataacaccttatgaggtggctaatagaaaaagaaattcaaactygttcttaccattcttgtggagctttgaatttcttcctccattcttgtttaccaatttggttctttcctatgcagaccagcaactcgtrtattgaagaaaaagaaactcaagattaatgtac

SEQ ID NO: 354 - DNA, 401 bp, Glycine max
atagagcgtcagcggcttagagaaaaaagaatcaagcagaagatgaaatggaaggctgggaatgcggaagaggrcgaccaagatgatatatctgggtcagaagtagatgaractgttgatagatggcataraaagagtaaagtatactttgatagtgacagtgacgakggtgaaagaaatgaygttacagggaatgcaggyataactaccggtgcggttacgttggaggagcaagaagctctggctttgaaattgttaaattccatgcactcatagratatgcgtaattcagctgtracattttgtgacagcaaaaacgggtggaaagagagcaattcctgaaacatywyaggagttctgttaacaaaaaattttgatctcccaatttttttgtcatctct

SEQ ID NO: 355 - DNA, 401 bp, Glycine max
tttcaattttaatcctcttttaaatttatktagaaatttaacccctaattatgtcaaataaatatgattcgcaagactcttgcgcacaccttttttttataagcatttacaaagaaaaaataaacacaagagaagtgataacatcttgaaattaataagagagttaataaaaaataaaggtgtaaatatgtttttagtaayttagtgttttttttataaaattattattatttttaatgtttataaattatgtttgttttatttttaatttttaaattactttaaataatactctagatagtgaaaaagttctacaataaaataaatataatttgtaaggaaaaaaataatttwwttacaaaaataaaaaataaatactaaattataaagattaaaaaata

SEQ ID NO: 356 - DNA, 401 bp, Glycine max
taaaargatttgaaattttgtgtttgttttagtcgacacaatcccatagatatttgagagaagrgacaaatactttctttaagagtttttttatcctattcaataggtcctctatcatagattaatatgttaaattttaacatgagaacaaactaaaattatgtagtaaaaagtaaagtgmtaattgatcatgaaaaccamtttaaaataaaagagtgcaaaagaaaataaagtgtgcaaataaaaagatattgaaaattaaaagaataaagggtttcgaaaagaaattgagattgaaagaagatcgaagtttaaggaaaactacaacaaatgtaaaagaaagcatagggggatggggggattcatcmattataagatcaatgcgagaaacattttttata

SEQ ID NO: 357 - DNA, 401 bp, Glycine max
taaggcaccagaaaggtagctatggagaacacatttgtaattttaaaaawwtttttagagattacaacgattccaatgagagggtgaagcaatggagagcagctttatctgaagtcagcaaattgagtggatggctttacaatgatcggtatgcttacttttagttgattaagttccataattaatctctacgactactascatagcatggcaccacttcttaattacttatttyatctgtaatctgctaaacagtatgtctgctcttctcattrtcgttttagaaagtcactttgttttgtttatccgagagaaatacatgtgtgctgtaaattaaaggttcttttaatctttttccagttwcagtgtagcagtcgcaatctgttctgtgcatacatata

SEQ ID NO: 358 - DNA, 401 bp, Glycine max
acaggacggggaaagtacagtagtagttaaggatatgtttccaagatgtttttaacggaaagttaattgtgtctaaagacttgctatgtgtccactcaaaacatgtatagttgatgaatgatgtaggctatctgatgtacatgtctggctaaaaagtccacatctygtggctctcttgttgccttttcatttttttrataraattttaaccttttgtaattttaggagaaaaatagtgaaatcataakattaacacaataatgtaaggttatattgtgcatgtgtgataaatratctatttaataaaataatttatgtttgatttttatcaartgtaaaattttcttaaaccataataattacgtattacaagagaaatcagtttctaatctaataagtta

SEQ ID NO: 359 - DNA, 401 bp, Glycine max
tgatgtacatgtctggctaaaaagtccacatctygtggctctcttgttgccttttcatttttttrataraattttaaccttttgtaattttaggagaaaaatagtgaaatcataakattaacacaataatgtaaggttatattgtgcatgtgtgataaatratctatttaataaaataatttatgtttgatttttatcaartgtaaaattttcttaaaccataataattacgtattacaagagaaatcagtttctaatctaataagttaagaaacatatatcatctctaattccatcactgaatttggattagcattttttcattcagaatggaagttgggtttttaaarttatcataattttttacttgaacaaggaaagctaaaatgtaagttgcattt

SEQ ID NO: 360 - DNA, 401 bp, Glycine max
tgactacaaaggaccaaagctaacatattatgaaatggggatgcaagwgtacaggagcaaattcagatctttaaagattattgactgaarggtaggtcaaamccgcagggatacaaagcatcaattgacattattactaaagtttgatcaaaaaatggcatwaaagctacagtctatttacaattaaaccttataaagccygataaacatagcagaaaaggtaaactctaacatgactgaaaccctgttcggataaactattcaataagcacttrcagaataaggaaaaaaagagtgttaaatgaattaagcttctctcataagttaaaatcaacttttatagaagttctcatttagcttctctaaaaacttattctaacttgtgcacacgttaattttaa

SEQ ID NO: 361 - DNA, 401 bp, Glycine max
ctaacttgtgcacacgttaattttaacttacrgacgaaactcaatccattttacctacttattttcttctcttagaagttcttgttgagaagttttcccaaataggacatgattttactatgcctagggtgacgttgataggtagttgttagcaagtccaaaaatgaaggtctagcaaaggaaggttttggtaaggatttkctcatttttctagtttgaatgactaatgttagaaactccacattagaacctgctgccattgctaggagcccagttgctcccgtccaccttgttggcttgctgctgcaccacaactactgactaaatgtttacatgtaagagragtgcattcattgagttaaaagtttttgggggccatatcagtaatttacacttttatt

SEQ ID NO: 362 - DNA, 401 bp, Glycine max
tcaactctctcctcagaattacagggaaattcagttgctttttccwtgcatctacaagttgcaagagtaaaacaacatgctccataagctcacccaacgccctctgaaatattgaagaagcgatcacatttattttgattatgaatatgttcatctaaataaacaagagaatataggyttattcaaagattagaacatttkctaatatatatatatatatataaaagcacrcaacactaatgccattgctatcacaataggaaaccaaaaacagcatctcaacattaaacctacaaagaaaaaacaaaatatgacatatattctacaaagaatattccagttcatgttttgataatgaatattgtaggatagttgtctaaattcyagtcacacctctttgg

SEQ ID NO: 363 - DNA, 401 bp, Glycine max
tcagttgctttttccwtgcatctacaagttgcaagagtaaaacaacatgctccataagctcacccaacgccctctgaaatattgaagaagcgatcacatttattttgattatgaatatgttcatctaaataaacaagagaatataggyttattcaaagattagaacatttkctaatatatatatatatatataaaagcacrcaacactaatgccattgctatcacaataggaaaccaaaaacagcatctcaacattaaacctacaaagaaaaaacaaaatatgacatatattctacaaagaatattccagttcatgttttgataatgaatattgtaggatagttgtctaaattcyagtcacacctctttgggggttgycttaattgcaacctcaagggtgg

SEQ ID NO: 364 - DNA, 401 bp, Glycine max
gtggtgktgttctcccaaagttcttatcaattggtatcaaagctttccaccatgtcccttagcctgcacacaggcagcatgggtggtgacgccacattgcagccagtgggtgtcaacatagtayccccaaatttatgatttaagagatatcaacatctcaacaacatactgtatgtatctgttagccattattgggcatgkgtcaggcaaaaatagaagctattcrtaaaaatcataatataagttacatctagattttgccttatagaactgaataaagacattaaaaagcatacaagtatctagcatgcatctgatgtggatttatacctgaatgactgtggtatcttctcctgatttcaacttaaacacaaattctggatcttgcaacttttgcaaag

SEQ ID NO: 365 - DNA, 401 bp, Glycine max
gtcatattgtcatttaattatgtaggcttctttgattggagagagtctctactagaaacttgtctttatatatggtacataaagtaactttgcctgcctgcttgaactttcttaggaagagagtatatttacaattagtatttttgcaatgactccattcatggctatatctttatagtccaaaaggaaacacttgccaakaactcttatcacaatctcgtcagcactcagcaaggaaaaaagaatcaaaagcaataaaaatacaaaggccaggtacaagtagcgagaagagaaaacagttgatcaagtgattggttcagtgaatcaatccgggccttttagattaaaggagaaggaaggaataggatttggtgttgtataaaatttgacacttaatgtca

SEQ ID NO: 366 - DNA, 401 bp, Glycine max
ttcttcttctgattctaacgcttctttttgctactgctacgcctcaatacgttcgacctcttcctcgtaaaaccttaaccatcccatgggattcaatttccaaggcccactcctcttaccctcaacaggtcaaccaacctctttttcattcctcatgttcatattcataaataaatagtactatatcatcaccctctttgkgttatttatttcctacttgatcaacttacagtacctgatttctttcgtatttgattggattatgttgttcagttgggaggattccttttttttwtatagggttatattttcaaaaytattctctatttcaagttatcgagtttaatttcyrtggaggataaaaaaaaatcatattgttaatcaatcagaaatcatctttg

SEQ ID NO: 367 - DNA, 401 bp, Glycine max
tttcgtatttgattggattatgttgttcagttgggaggattccttttttttwtatagggttatattttcaaaaytattctctatttcaagttatcgagtttaatttcyrtggaggataaaaaaaaatcatattgttaatcaatcagaaatcatctttgatataatttttaagacagtgactatggtagcwtatytccgggrttcaagatatagccctgcaaggtttctttggttatgaaattcaaagttgatccaataattttctgtcactcttgtattggtgttcrtgaactgggttctagtcacaaatcttyaaaagacattttttattcgttatggttggtgatttmttatagtatatatctgtacacagacaatgattattatttatcagcttatat

SEQ ID NO: 368 - DNA, 401 bp, Glycine max
tgcaatgactaaagmaatgaagattactgggatgcacgaaagtcatgccttaaatctgaaatcattgttcgctgataccagggaaatgggatatgatagaatgtaaatcagcaatctaagaatagaacggtaaaaacagcagagktgataattaagcattaagtggaaactactgggttggcctattccgtctggaagtamtgaaacggatttatccaatatacatcaacacatgaaatctgctgaatagaatctaattacatttatgccatcacaatgattttataaagtgtgaatactaactgagttctaaacagatatcrgtatctggtgaatttaggcggataacatctttccccttcctcctctcatttaggttttgtttctccatgttgttttgt

SEQ ID NO: 369 - DNA, 401 bp, Glycine max
aatagtgtctctccccactttcttccttccgaattagccaatttcctctcattttcttcctctttccatgtttttcattcttgctttgattttgattctttctaaacttcccttttaaaattctagaaaatcttttgagatccatacattttgttcccaacccacacaactttgagaagtttttgtttttttttttttttkagttaaggatagcatcctaagtaaaataagctagttagttattgctcaaaagaaaatatatactacattagctctttgcaagaacatagttaatgcaaggatggcccctcaactgaagtgaaacttgtttggaagataaaggttttataatctactgtcttaatcattttgcacgtgtatcctaatttgcttattcccac

SEQ ID NO: 370 - DNA, 401 bp, Glycine max
aagtagatatttaatacctttacctttttaaaawgttgaattcaatacaaaaattgaaatctatagtgacattctttgaatgacattttctcttgtycaaattcagacctctgccaacttcaactttatattcagcctgtgaacaaacaaaagactactrcasaatttttccaaatttgtttctaacaatatgatccttcstaacagagaaaccaacaaccttagcatactacaataaaattgataygctatctycaaatcacagaaattcaactgtrctacatctccagtcatcttctgcacaaaaaccaccactttttccacatccaatactgtgagaatcataatcctcttccaccytatactcaatcgactcctcatctttctcattgtcattgtca

SEQ ID NO: 371 - DNA, 401 bp, Glycine max
tgaaatctatagtgacattctttgaatgacattttctcttgtycaaattcagacctctgccaacttcaactttatattcagcctgtgaacaaacaaaagactactrcasaatttttccaaatttgtttctaacaatatgatccttcstaacagagaaaccaacaaccttagcatactacaataaaattgataygctatctycaaatcacagaaattcaactgtrctacatctccagtcatcttctgcacaaaaaccaccactttttccacatccaatactgtgagaatcataatcctcttccaccytatactcaatcgactcctcatctttctcattgtcattgtcatcatcttcaacctcatcctcttcatcttcatccacaaatacattaccatacgca

SEQ ID NO: 372 - DNA, 401 bp, Glycine max
gaatgacattttctcttgtycaaattcagacctctgccaacttcaactttatattcagcctgtgaacaaacaaaagactactrcasaatttttccaaatttgtttctaacaatatgatccttcstaacagagaaaccaacaaccttagcatactacaataaaattgataygctatctycaaatcacagaaattcaactgtrctacatctccagtcatcttctgcacaaaaaccaccactttttccacatccaatactgtgagaatcataatcctcttccaccytatactcaatcgactcctcatctttctcattgtcattgtcatcatcttcaacctcatcctcttcatcttcatccacaaatacattaccatacgcatcacttgacacataagaggaagc

SEQ ID NO: 373 - DNA, 401 bp, Glycine max
attgaatattttacatctttatattaataaaagtaaagaartatcgaaagagattcttatatatttgagcggaattattttatatttttttatcttttaattaaaaaataatttaattatttcaaataagaatatgtacttgtcctaactacatcaattacaatatttatatgactttatgaattaaatagataaaaaaawttattttttgmtcaattatataatattttccctccaaaacttctttatttttattaaataaagattttctaattatatataaagatggaaaaaagtactttaccttttatattkcttataatcctatgtatttaataggggtcttcagaatcaaatcaaattaaaagtaaaatcgaaaatcgataaaaaaaaaataattg

SEQ ID NO: 374 - DNA, 401 bp, Glycine max
tgattttaacttataaaaaaaaacttaacttattttagcttttaattttctttctcttatttyaattatacattgtaatcatataaaataattaaataattgaacacaaataattaatatattgaagttaaaattaaatcatttgaataaaattaatgtattragattaagattaaatcatttgaatataatttttgtatyagtraagtctcttttcccttgataaatgaagggttaagaaaaaaaaaatatgatggcattaatgcatccatctacatttactaacttattgtaacaaattattttagctgtttgtctattaaatcaagtaataaaagaaagatagtgctagagagtggcattccatttggaatttccatccagtattttatgttgatgat

SEQ ID NO: 375 - DNA, 401 bp, Glycine max
aaaaagagtctgcaatctaattcacaaaaagttggttattacacgacaaaattctgggagtatataaaggaaattcattcaggaatgctgtgtatatgaatatggaaaagctacattacataaactgaaaactgaagtccaccaaaaataaaagaaactgaaaattaaatgaagaaaaarcagaaaaaagagtctgcaacraacgtgggaaaaaattcattgttaaaatacgtgaaaataggagaaaattctaaaagaaaaatctaaggggtgttccagaatggaaaaagaaataaaggggcataacataagttgagcaacaaaattagaacattaaacattgcaaaagatgaaaatggggacatattagttggatttgttacctcggataagaagaaggg

SEQ ID NO: 376 - DNA, 401 bp, Glycine max
gtatctttcgttggccactttttccgtttcatttggaacagacttgttgtttgctctgtcgccggaagcccatctcactaccggaaactacccctccgggacccctcttcttcgccgccggccaccgttgacgacgtcttctcctccgctgcaaccactacwggcggctatgactccgattccgatttggtgaacctcaaratcagcttgttgggtgattgccatattggaaaaactacttttgtggtcagcatgtttctagctttaccatttattttttttggaagaatttaacaagtgtgtactagaaatttaaaaccttttatattattatcaacatggtatggtatgacatgattagcaaataaataggaatcttaagcttgtagtcaggcttcaat

SEQ ID NO: 377 - DNA, 401 bp, Glycine max
ttgaagggaagaagtgaaacaatagttataagcaattcaattggcaacgaattgatgctcattaggctctagctataagatatggtgattgataataaaggtgtggaagggtactsaaattttcttcaaatattccaatggggtasaaatgtgtgtgtatgaaatggccaatgagtgcaaccttatgcaacagacgttgcytcagtragaaaacaatgttgcatacttctatatggttttttgtattttttttcttttctgtaaattccaagtataagttgccgttattagaaatttttttaggaaaacataaatatatattaatcaattactataatatattastgttggatttagaatgaaggcaacctttggtgaaaatgcatgacattttaatggga

SEQ ID NO: 378 - DNA, 401 bp, Glycine max
aaattataatttaatattaaartaatccttaaacattacaacataaaagatatatcagttcacaaaatagatgtataaattraagttaaccttctacacaacaatatgatattktgacacacttttttttyatattttcatgaactatttcaaaaaatttgttttttccaggaattaaattatccccccttatatttttarggactaaagtggtcatccgtcctttaaaaaagatgtaagggaaaggttgggtatagtttagtatttttcaaagaaaataagttctgatcttcaataaaagggaggtgaaaataacatgggccatgagaattctaaattacctyattggagtcgacttgtaaaccaggtccataacacattgtaaacgacattctcgcagc

SEQ ID NO: 379 - DNA, 401 bp, Glycine max
actatttcaaaaaatttgttttttccaggaattaaattatccccccttatatttttarggactaaagtggtcatccgtcctttaaaaaagatgtaagggaaaggttgggtatagtttagtatttttcaaagaaaataagttctgatcttcaataaaagggaggtgaaaataacatgggccatgagaattctaaattacctyattggagtcgacttgtaaaccaggtccataacacattgtaaacgacattctcgcagcttcgtctgcaaatgaactatagctttacaatccgtctatttacatcctctgtaaagtaagawtaacaatttttttcatgatgtcattgatatatgaaatatccatagatgattaacatatgtmaaaaaaaattrattcatcat

SEQ ID NO: 380 - DNA, 401 bp, Glycine max
ttttggactaaattgtcacctaatatttggctactcaaagcaccccattttggaccaaattgatcattaatgtttgcctcctcaaatcacacctccataartcaaacatttagtaacaaattagtccaccttmtaaattacacttacgttatcgacatcattgtcataaaccacgamaactttgtcaatgtctttgagtgyaactaggtcatctgcatcgtcatgatgacmtatcgcgayatcaatgtcamaccaaaaaagcttagttgtaagtayactgagatctacatggccctcaacatcgtcctccagagcgttaacaacacctgccttgtcaccatgctcgcaaccatggacaacgagagcattgccaagatgttccaagtgccatgytagttaca

SEQ ID NO: 381 - DNA, 401 bp, Glycine max
ctttttttattcaatttgattttcttcatcttttaaaatattcattttagtcttaactcgagtctgttacgcagaagttataatttctaactttcggtcgacacacagaaattttgattaaatgcggaaacacacagttaaaagaagaaacaaaaaaggagtttaaactcaggaaaagatttcaatatgcttcaattctartgtgaaaatttgtagctctcattgacgtaaggttatgctctggatttaggcccaacatctattacttcaatgtttgactaattacttggttcagaacttaggttagtctctttatgtatcataggtacgattaatcagtcatacgtttgattctaattatgtaatctgaaaaaaaaatattattattattttaaataaat

SEQ ID NO: 382 - DNA, 401 bp, Glycine max
ttgtggttcaacgtgcattggaacataagaaacagttcaacttacatatatatcatttgacttgtttttaagtcatcaatgtaggatttgttattcagcawmtccccaatccaaatggcatagccaagctataacttgttttcaatagtcaaccaggataaatttcacatttgatcgagattcaaagataatagctcctastcaagtcttttttttttkaaatcccttttccttttttgtttatgaccatgttttcttttctgggcaggtrggtttttttaattttctttcttaatactgtttctcgcttttggatttagtgttttcttatatatgaaattttttgatagaaaaagatgagtggacaccaatatggtaatatgctgtgttttwtatatata

SEQ ID NO: 383 - DNA, 401 bp, Glycine max
agtcatcaatgtaggatttgttattcagcawmtccccaatccaaatggcatagccaagctataacttgttttcaatagtcaaccaggataaatttcacatttgatcgagattcaaagataatagctcctastcaagtcttttttttttkaaatcccttttccttttttgtttatgaccatgttttcttttctgggcaggtrggtttttttaattttctttcttaatactgtttctcgcttttggatttagtgttttcttatatatgaaattttttgatagaaaaagatgagtggacaccaatatggtaatatgctgtgttttwtatatatatataaatccataagttcatgattttgatagatgattccccatggcaacattaactaaccattttgatatg

SEQ ID NO: 384 - DNA, 401 bp, Glycine max
ttttaaaagtttggtgttgaagtgctttctaggaagtcttacttcaaaaacataattataaagatttacatatcaaattctgttaaggccttttgactcaaaatctccttccgcatttaacttttggtacaattactttatataattgatgttaaaagaattatttttatttagaaataaattttgttaatttagaaaatktagtcttacttataaaaaaattaatcatttataagataaaattgcaaatatatgtctaaaattatgtggtatatacatctaaaataaacttttattacctagaaaaagctaaaaaaattaataattccaaaagcaattttattttttaagacggtcaccattaaaacattattactagatacatattacaaatataaaat

SEQ ID NO: 385 - DNA, 401 bp, Glycine max
tttgccattaagatccagttcccataaagaagatatgtcatgttgtactacaacatcatcatccagcaatactaccttgtttagatctggaaacagctgtgatggtccacaaaaaatcagattatgaaacaatcatcaatcatcacttagcattcgtcttgttattactaaaatcttactcgaggtttyaaattacagtcstatagttttgttgaattccttgatattacacaaaaaagtggaataattatcaattttggtraatctcatgtctaaatcatgaaaaagagttattaaatgaaactgttagactcaaacaataataattatcaataaattttaatcaatatagaaaaaatattaaaaaataataacaaagagagtattattaacattcctct

SEQ ID NO: 386 - DNA, 401 bp, Glycine max
tccagcaatactaccttgtttagatctggaaacagctgtgatggtccacaaaaaatcagattatgaaacaatcatcaatcatcacttagcattcgtcttgttattactaaaatcttactcgaggtttyaaattacagtcstatagttttgttgaattccttgatattacacaaaaaagtggaataattatcaattttggtraatctcatgtctaaatcatgaaaaagagttattaaatgaaactgttagactcaaacaataataattatcaataaattttaatcaatatagaaaaaatattaaaaaataataacaaagagagtattattaacattcctctcacaggaaattgcgaacgtcagaattagttgcaaacaccacaaaaaccttccaactttgaa

SEQ ID NO: 387 - DNA, 401 bp, Glycine max
agaaggtagacgagatcgtgccatggcatttacagcgtattcttcagccaacttcaaacaaagacaatgcagactttgaggaacaccgtgtgaagctatatgccaattaagtgactccttctttcttgctgattgcacctcacgttccatctgtgacagctacatatatataaacataaaataaaatgacatgtcagacawtatactatatcctaagagtaattaacaagcaaaagcacaataacaacgtaaataatcagtaaattttgtgtgtaccatggctttggtcttgaaagcaaatgccttgaggtcttgttttaacgccaacactttcacaagctcgttaaatgacattgctcctccttcattagcattgccatcatttgcctctattagcgctc

SEQ ID NO: 388 - DNA, 401 bp, Glycine max
caaatggtaattaatctgtaagcttagaatatattagtcaaatatcatttttatcaaagtatctctgaatctttctaacccattttctgaaattttaaataattttttttaacatttgttgtgtccgtaagatattgattacgtttttttttattaaataatggattatatgtttaatatgttattgtcacttataatttkayagtcttttttctaaaattttattttgtcttattatttttctttttgtcgaatccccgtatgaacaatatatgataaacaacacaaaattaaaaatyatgtcgtattattttttctaaacttttattttgtcttrttatttttcttttgtcggatccccatatgaacaatatatcgtycgtgctggcagtgttcgtatt

SEQ ID NO: 389 - DNA, 401 bp, Glycine max
aatggtaattaatctgtaagcttagaatatattagtcaaatatcatttttatcaaagtatctctgaatctttctaacccattttctgaaattttaaataattttttttaacatttgttgtgtccgtaagatattgattacgtttttttttattaaataatggattatatgtttaatatgttattgtcacttataatttkayagtcttttttctaaaattttattttgtcttattatttttctttttgtcgaatccccgtatgaacaatatatgataaacaacacaaaattaaaaatyatgtcgtattattttttctaaacttttattttgtcttrttatttttcttttgtcggatccccatatgaacaatatatcgtycgtgctggcagtgttcgtattta

SEQ ID NO: 390 - DNA, 401 bp, Glycine max
ataattttttttaacatttgttgtgtccgtaagatattgattacgtttttttttattaaataatggattatatgtttaatatgttattgtcacttataatttkayagtcttttttctaaaattttattttgtcttattatttttctttttgtcgaatccccgtatgaacaatatatgataaacaacacaaaattaaaaatyatgtcgtattattttttctaaacttttattttgtcttrttatttttcttttgtcggatccccatatgaacaatatatcgtycgtgctggcagtgttcgtatttaaattcattttcattttaaatttaaaaaattatggcgtttatcttaacattattttttacaacacataataaaaaaagacagttaaataaataatta

SEQ ID NO: 391 - DNA, 401 bp, Glycine max
gattacgtttttttttattaaataatggattatatgtttaatatgttattgtcacttataatttkayagtcttttttctaaaattttattttgtcttattatttttctttttgtcgaatccccgtatgaacaatatatgataaacaacacaaaattaaaaatyatgtcgtattattttttctaaacttttattttgtcttrttatttttcttttgtcggatccccatatgaacaatatatcgtycgtgctggcagtgttcgtatttaaattcattttcattttaaatttaaaaaattatggcgtttatcttaacattattttttacaacacataataaaaaaagacagttaaataaataattataagcttttttattaaaaataatatatatatatattat

SEQ ID NO: 392 - DNA, 401 bp, Glycine max
taagtatgaaaaaaaaacataaaaagatcagattgaattawttaaaattaaatatattaaaataatatttaaataaatttaagtattattttaatacatttaaattaagaaaaataaagtaacatgaagagtgaaactttcattctatatcaactcttttaattagacacctttaagtgtatttttcttctcttttatackgatatgcatttagcatgctatctyatcaatgagataaagaaaatctttttcaatcatcttaaactagtgatttgattactgattaagatttaatattgattggtgattagtgatcttaagtgcacatagtattataagtgcatttgataatattattatctccgctgataaaaaaaaagtacatttatactattctccta

SEQ ID NO: 393 - DNA, 401 bp, Glycine max
tattcgtttgttgatatgattttatttttatttttcatttataataagtgaaaatatttaaaaattaaaacaaatattaatacttcctccttctttatatattatacactttttattagattttttcaagttgtttcttgtattaatttttttaactaaaatacycttaatttataataaatattataaattaatccgagycattaaataaatagtamtaatatattatgctaaaaataactcggatgtactcctataatgattaacagcatttttaatagcagtaaaaaatarcatttttagtaaaaacttatacttttaattttttattgatattctaaaaaaatrtttaaaaacttttaatattgtactatcttttggaaatctaaggttttaaatga

SEQ ID NO: 394 - DNA, 401 bp, Glycine max
gaaattaatgttgaagtcggtgattctgtctccaacctccacgtgttgttcaattttttccaatgcgaatttgtgctcttataattttgtatccatttttaaaatattagtctatagttattgattatattctaaaactatatattatcgaattatgtgtgcaactcaacgcgctagatgtactcagaaagcaatcacaakcaaaatatctagctaggtatatatttgggcttatttattttagagagaaaaataaacaatactattaattattaataaataagattaatagttaatattatgtacatatgtaataaattatgactgttttaaaatattaaaatttttcttcatgagtatacatattttagagatgctagccaaatctatattcagaaaat

SEQ ID NO: 395 - DNA, 401 bp, Glycine max
aatttaataacacataataatatttattagtagtaactacgcttaaaaaataaagataataaatayaattatctatcatcataatattgttttagaattatatcaacaattttaatatcaagtttttaatttaaaaaataaaatagaaatagttttttgggcaaactgattcaaacttggatgattcgtccagttttggayaagttcaattggttttataccagttttttttgtaagactggtttctagagttaaatgaactgrtttgattattaatttctggttcaaccagtgcatgcyaattggttggtttggttcaatwctaatactaatattaatctgamttattaataatttttgcgcgcgtgtgaaatctwaattacttrtagttcgawgccaac

SEQ ID NO: 396 - DNA, 401 bp, Glycine max
tcatttatgatttaccaattaaaattctattataattttttacattgatcaaagaaakttttcttcaattaacgaraagcgtgaattaattacaggtgactattatcagaattcggttggatgcaagtaattctaagttgatgaggaaaatatcawaaatctcaaaaagagttaaaaaaaaggaaatccataaaagtaatkaacttattatagagcgaggaaactaagttagagagagctgcatgtgctctgatacaacaaaaagcaagcactcatatgttaagtggaactaacaggtctagcaatctataccaagtaccaacactaaactaataagttacactcaagttatattcacattgatatgatgataactatacatgcattgatgcatgttgatg

SEQ ID NO: 397 - DNA, 401 bp, Glycine max
ttgaactttaatacaagaatgagcttaakaacttgcatgtttccaaaaccaatgtcgtatatatttatatgtaagaaaatacatctaacaacaaattactaaagagtaaagacgcataagcgccatgaaatcctaaaattttaaaatccaattgacataataacttatttgaaatcctaaaattttaaaatgggtaacgarttaaacaaaaaagtagaatataattgaaaggaagaaaaaaaaatataatgattaagcatattgaaaccaatatggaatctgctttacaaaggacacatatgaaaaggaggaacgtgatggagtgcacaaagtcaaaagctaaatttatggagcaaaggtgaaagtggctgaaggaaccaagcatgcacatgattgaggtt

SEQ ID NO: 398 - DNA, 401 bp, Glycine max
aagatcaggtgttaatgttaaaaaawttttatcaagaaggtaagggatgaacttagaaaaaaaggaggtgaaaacaacagttccgaaatgacagcaatccagtaaccgactaaagtgsaaaactgcaaatcgtttaccgaacacaacaatgggttgtccttttgcatctagagattcaactcaacacttcagaggtagtgyccattttggagattcaacaccgtaggtaatctccttctgatttgaatgatgcatttgatttaacgctatctacccttcatggtttaccactcttctctcaagaaatttttcgtaaaattttgatctyttctaccctttctatcaacccttcttgcagcatgttgaagcgtggatacaaaccaaagccatggagtggagct

SEQ ID NO: 399 - DNA, 401 bp, Glycine max
caaagctgttgtctatttgttagtaaggaagtaaaatgctattgttatccatggttgtggaagtaggaactggaaagtctctcatcaatggagttgtgaacttttcatggattgtgactgttttgggacaggtgcttcggaagggacatttctgagttcattcgttaaagyttggatttgtatattattcttcatcaatargacataaataaggatttggatttttctcttttcaagtttcttagggtttagtaacacgttgtcctactactttatgacatttatatttaaamttgattttatatgtaaagttaaaaataaaaaaaaaactaaaaaattattgtgaaatactctgacaaaaattatttacgtgtgaaacttgaaaatataattgagacact

SEQ ID NO: 400 - DNA, 401 bp, Glycine max
ataaatttataaaatattcackatacaaatcaaatcatgagaaaataaatttggtaaataaaatcataaaaaataagtaaaagaagtacatacaaataagtgwgataacaacttataattytagsaaagcatatgatttctaactattcaatacttttacaacaattatagattttaatgtgtccgtgttatatttgtgtytgtctccatgttcgagttcatgtttcataggtttcaacaccttttcatttgctggagtttcaatttagattttttgtgcctactgccttggtaaacatacattttggactttccaaggagcaccttctctgtttgaaataaataaatattcatgamacataaaccttgcttttcatttgtatggtgattttttttgtctt

SEQ ID NO: 401 - DNA, 401 bp, Glycine max
aaggatgaaatacttagatatgaatatttagttatttttatctgcatagtgcatgaagaatttttcagatgcagctacraataatagatgcgctttgagcatttttattttacaaaaattcaactttgaaatattatatatggctcaacatacctatttttcactagctcttgttgttttcaattcctgacatcagacttragtaacttctctggtagatctccatattttgtcatcaattcatcatatgcacttgtgctatggtctgtcaagccccatgctgtgctactcaatgctttccatgaaattacatgcaactaaaagcwtgtcattgcaaaatatttttattttcagatatgaaattacgtactctatcatttaagaattaccagtgagtgaaa

SEQ ID NO: 402 - DNA, 401 bp, Glycine max
aatcaattgttttttatattcttttcctggtaaakatttttatctaatatatttcacttattttcctkttataatttttagtgtaataactacgtraactcgcgccactattttaaccttggcgattgttgaatgcttttgataytatatataaatcccttttaatgatagtatataatgactctcaaaacaaatttacaratacttgttctagccgtcaagcttattgttaatcatgaatttcaaatgttgatttatgttggaagaaaataggtattgttattaataaaaacaatgaaaaattaagttgtaagttcaawgtatttatataagaaaagaatatctaagatactcaatttttcatttatttcatctatgcattttctaaccagaactacata

SEQ ID NO: 403 - DNA, 401 bp, Glycine max
ttagagattaatttcttcaagttatagaaattactaatgtatactttgtttctttcaacgatgtagatttagttttttattgtctcgtttttttttttctttctttctatgaaacattagacgtgatcatatgaacaaggcaaacttcattgtggtgggaggttagggaactgtcaacaaaaaattataaaatattgtacraaatttgtstttttcttttggttagtagggctttctattgttggaaacggagaggtaggtattaaaattgaccttacaaattacaaactaatgaaaaagaaaggcagattgtgttttcaggatttgcacgtctttgtagcaaataaggattaggtagttagcccccctaaataaaggatttggtagttaaagtaggatag

SEQ ID NO: 404 - DNA, 401 bp, Glycine max
aatttcttcaagttatagaaattactaatgtatactttgtttctttcaacgatgtagatttagttttttattgtctcgtttttttttttctttctttctatgaaacattagacgtgatcatatgaacaaggcaaacttcattgtggtgggaggttagggaactgtcaacaaaaaattataaaatattgtacraaatttgtstttttcttttggttagtagggctttctattgttggaaacggagaggtaggtattaaaattgaccttacaaattacaaactaatgaaaaagaaaggcagattgtgttttcaggatttgcacgtctttgtagcaaataaggattaggtagttagcccccctaaataaaggatttggtagttaaagtaggatagaataaaata

SEQ ID NO: 405 - DNA, 401 bp, Glycine max
ttttwaaaaaaatacatttctgataataaaaaatctataattataaatatttacatgatgcgtaagatgtttgttagttaattattactttcatatctttatatactcttgaaaattttgtttgtctctttttaaaatctcttttaaattgtctttgcattatattttttatcaaaataattttagttattttataatttktgtacttaataaacaataaatggtacaaagtaataagaaaaattgattttttttctcttgtgagaattggaaaatatgamtaaagatattaataattaaatagatattgagtgaaaagaataagattatgcattttgataattttaagagtaattttaaagaaataatacaaactattaataaatttaacattactaatt

SEQ ID NO: 406 - DNA, 401 bp, Glycine max
acaaraattccggctattacctaaaacccactgtaaatcaaaattaaattaccawcaacttacggaaggctacttatccctctactataatcttgttgatatatatatatatatatatatatatatatatatatatataaatcracratcatgaaaaaamctcagcaatatagtggactaaggccaagctcattrtaattygaggataatacagtgtgctcttaatttcgtcagtaatttaaccttggataatagcaaaggaaaagacgttagtaattttagtaaaaatacattcgcagctagctaattgttaatgcttaaaggtgtgctgaattaaatggtggtttagagcaaactaactttggtgaaatcataaatttttctttgctggataaggggga

SEQ ID NO: 407 - DNA, 401 bp, Glycine max
tacttgaattaaaagttaaaacccttcatataatagctcacaatccaatgatggttaaagagaaaaaaagaaacctaacaatggcaatgaaaatgaaaaccaagttaggatgcgcagccattaaccaacgatttttcccgttgtttaatttaagattttyaattttaataagctatctggatctaattctgcattgaagtsataccaaacaaaaataaaaaataaagttatcacttattatgccacttttagggggttggctgattaaaataagtagtattaataaatttccaagcccatgtgagtgcttatttttwwaaaaaaatatggagcgcacgttttgtatttatggacgtgacagtctctttggttgccacgtggagyctccctcggatgccttt

SEQ ID NO: 408 - DNA, 401 bp, Glycine max
acagctttttctcattttgatatattcaatactttcatatttacatggcaaaatttaaggctctagtttttgaagaaggaacacctcacagtaaagatatgaaaaagaagaaaaaaaggatcaygcaatgaacaattatctattttagcagatgagatgtgtgaccgcttatacaatttaattgaatcagagaagccagtkatgtctacatctcattaagatattgaacatgtaccttactcctcgtttcrtaaatataagactccaacgaattcttcctgtctttggtcagctcaattgttctgtcctgatcagctaactggagttctttttcttgagcttccaatatctcagccttggtcattccaccataaatgttttcactcacaggtacatgaagc

SEQ ID NO: 409 - DNA, 401 bp, Glycine max
atggtcagcaaggccatttaataatgaagtctttctctccttcaagaaagggggaggtgtctattgcattgtcccaagattcaacaacagtagccctacatggatcaaacaccaccataatgtcttatcataaataatctctataaacaaaccatttaaatcttaatctttcttaatgatttaacttatagtttttcttcrtctcttactacctctaattatatcttccatctgattcactctctttctttagagmttctacaaagtcttcacacgtgtctaaaccacttaaggcatgattctaccatattttctacaacagatggtgcctaactttctaacgcaatcattcctaattctaccttgtgtgtctacttatccatcataacattcttgagttg

SEQ ID NO: 410 - DNA, 401 bp, Glycine max
taaaaaatcaacggttgaaactatgataaaatacaagcacatgtataacaagtagtagctttatacataactgagtcctagacttgcaattcaaaagtaaaagctgcaattatgatgaygattaccctatagtatatactatttttttactgtagaattaaaaataccaaaacagtaaaatgaagaagatgaataagctcrtagagactataccacatgcctttcatgaagcacccaaaagaagcaagaacagagagggtaataattaattaaaaaaattaataacaaagaatcacggacaagatgatctaaactcyttcacatcatagtaaagttctaaagcaggcatactgtgaagcaacttattttaggagatgtcccaggtggtaattcatctggrt

SEQ ID NO: 411 - DNA, 401 bp, Glycine max
ggacttccatcacatgaaagtccaatggaaaaaggaatagaatcctggacctgaacaaacacaagaaattacattaattttatagagagcaatacatgctaatgcaaaattctaaaaaaaaaaacaaygatatctatgaagttagatatatttcaattaagatagacaaactaaatgcagaaaataaacctagcacctagktawcaacttggttcatttagtaattattacatttctaacctaagaatctacaaacacaaaaatctactctcctacatatacatatcatatagataggatragaatcaatgttttgtttcaatattcaaacctcatattctttgacacggaaaataggactgagcattgcacactggagagcacaaccacgtgctacacac

SEQ ID NO: 412 - DNA, 401 bp, Glycine max
attcatcattcaacaaaacatcaatcacacgttgcttcactgcagcaatcacacagttctcatttccaatatcaatccccactccactcattttaatttactgcgtccttccctcaaactacaaacaactaattcaatccaattcaccctttccacttcaccaacacaacccaaaagtcaaaaacttcacacaaagccggsccacaaacataagcttcacatttcacrcggcgctattactacaaaaagaaaaggtwggaaacatacacatcaaaatgaaaactttatttctgcatcatggaaaggtatagaaaacaatgatatagtgacaataaatgctttgaataaagcaaraaagktatgaagctgaagaaatgctttgaatgtaaaaagaaactycg

SEQ ID NO: 413 - DNA, 401 bp, Glycine max
accaagatgatatatctgggtcagaagtagatgaractgttgatagatggcataraaagagtaaagtatactttgatagtgacagtgacgakggtgaaagaaatgaygttacagggaatgcaggyataactaccggtgcggttacgttggaggagcaagaagctctggctttgaaattgttaaattccatgcactcatagratatgcgtaattcagctgtracattttgtgacagcaaaaacgggtggaaagagagcaattcctgaaacatywyaggagttctgttaacaaaaaattttgatctcccaatttttttgtcatctctttcaagaaaggtagacatagaatcaatttacttaattttatttattttaactaaaaaaatgggagtaamggacatc

SEQ ID NO: 414 - DNA, 401 bp, Glycine max
ccaccaccatttccatcttttggccctcaaaccatcggccattgttagaacatgttgtaggaaatgcatctttgggtctttcgggaaagcataagattggctcacccatgacgatgattcccaccataagggaaatgcataaggaaatgcatctttgggtctttcgggaaagcttaagtcaacttataattctgattaatrgaaacaatatggttgtgcatgctcgaatacccctggtgaattaaaaagacttatgcttttataggasgtcccagtacgaatatgaattcatcgaaargatcgtggaatcaaccgtgcaagccttgcccggatatgatgtttttctgagttttaccggagaggatacccgctacactttcacaggttttctctatratgcc

SEQ ID NO: 415 - DNA, 401 bp, Glycine max
ctatgaacactagatattcttctttcaagttctccacaaaatatttaacaatyctgaggcccaatattttagctcgcaatttttcactccgtgtctgcatcaaaacctgcaaaaaaccagataaagaagccagaaagatattcagttgcttaggaatacaagtatttgcggggaacaaacatatagcattcaagagctatwcatattactgaatacccaaaactataacaacaaactaatgggctaaagttcaacacataaatgaggcatggatgactacaaaggaccaaagctaacatattatgaaatggggatgcaagwgtacaggagcaaattcagatctttaaagattattgactgaarggtaggtcaaamccgcagggatacaaagcatcaattga

SEQ ID NO: 416 - DNA, 401 bp, Glycine max
tagttgttagcaagtccaaaaatgaaggtctagcaaaggaaggttttggtaaggatttkctcatttttctagtttgaatgactaatgttagaaactccacattagaacctgctgccattgctaggagcccagttgctcccgtccaccttgttggcttgctgctgcaccacaactactgactaaatgtttacatgtaagagragtgcattcattgagttaaaagtttttgggggccatatcagtaatttacacttttattatggcctttagagagttaattacttctattgttagacacattcttaatctattgttaaaatgtcttggggcatccatgcacccaaactaatagggagaatagtaraacmagccatatttataacagtgtttcccgaggacac

SEQ ID NO: 417 - DNA, 401 bp, Glycine max
gatctgtccctcaccttaaaatcacaatttctgattgatggaaatttaacttcatcatgtgtatcatactattttgtcaggcaaattacattgrcaccccgtccaatactgttttctttaccccacatgtacctccttcaattaataaatcagggaagatatatgttaatgataggatccaattgcatgctatgggaatcragttgcacattagaagtatgcaattctaccaaggtttataaggccttgggctctctaactaagtataacggctagcttttgtggtgktgttctcccaaagttcttatcaattggtatcaaagctttccaccatgtcccttagcctgcacacaggcagcatgggtggtgacgccacattgcagccagtgggtgtcaacata

SEQ ID NO: 418 - DNA, 401 bp, Glycine max
atcaattggtatcaaagctttccaccatgtcccttagcctgcacacaggcagcatgggtggtgacgccacattgcagccagtgggtgtcaacatagtayccccaaatttatgatttaagagatatcaacatctcaacaacatactgtatgtatctgttagccattattgggcatgkgtcaggcaaaaatagaagctattcrtaaaaatcataatataagttacatctagattttgccttatagaactgaataaagacattaaaaagcatacaagtatctagcatgcatctgatgtggatttatacctgaatgactgtggtatcttctcctgatttcaacttaaacacaaattctggatcttgcaacttttgcaaagaaaattgcattacaataaacaattc

SEQ ID NO: 419 - DNA, 401 bp, Glycine max
cctatattaacaaacctgtgtgacagctgcttgtccaataacttctagaatatcaagcatatgctccaaaacttctcctgcaaagactctggtaacagcagaaagtacagaaaatacatggttgcaggtgactgaacctgtggaattccgggcgcactctatcaatagcttaatgttaatttcatttatcattttttcctrtcaacaatggcaaaacttaataatataaggaaatagctaaaatagtgaaaaggaagtcaaaataatatttctatygtaataaatttttcagcttcacaactaggaagcatacatttagcggagccatgcttttaagagaaataattatatcctccaggattatcaacagagtctgttgtatatgatatactgtgtaattg

SEQ ID NO: 420 - DNA, 401 bp, Glycine max
tcccaattcctttgaataaggataaaatcattagctgcaaccaacatcaacaaataagttacttccttaaagtcccggcatagcacaaaaacccacacataacacaatatataatacacaaataatctggaactgaacatatgaaaccttgatctgtatctctatctccacaactaaaaatataaatagcaacatagaagrgcrttaaaacgtcaaaccttcccatagttagagaatttaagagtggaacccaaaatgaagccaagaatttttatttttgtaggctggtcaaacctgaaaagatatgtttgggaacaaagtggaataaagaatctcagaaattagcacaaatcaacatttttcatgaatgaagataaggaacattcttataaaaaataaaa

SEQ ID NO: 421 - DNA, 401 bp, Glycine max
tctctatccaactctgtactcckgtggctaaacaaatcgttcttatagttcctgaaccgctcatccatgccaataagaatctctaagcctgaaataatgcatmacataagaaaaamaaaacaaaatcaaaacgaaaatagaatataaagtagcaacataattcatatgctccatggtaatcactgagaagttaattcggtwaactgaattgcttcagttgcactagctacgttgaaaagagcraaattaaaaatgagaagattgacctcgaagagcttcggtgaaaatagcctcggtggagatgtcagcggcttttttgggatcatacaagatggaagggcgagtgagtggcctcttgagagggtcagagtcggttttggcgaaggatctgataacttcta

SEQ ID NO: 422 - DNA, 401 bp, Glycine max
tgaagaaacgttaaataggaagacagagagttagaataaattaactattaaaatattggaaaattttgtattgattagactcttttttttttttatctaaaccgtaccatttatttatttttatcttttttattgactctaataatcttgaatgtttctaaaaatytagtgaagttattaaaattttataaatctacccartcttttcaaattttataaactaatatgttataaatctattaaaattgaaattacaaaatttgtcataaaaatatttttaaaaaatcttaaaaattattacwttcatccaacttgtaaaatccaaaagatttattacaccaaactaatattctaaaatcatattttaatacatctccagtttttatgctgtattttctcat

SEQ ID NO: 423 - DNA, 401 bp, Glycine max
tacctgatttctttcgtatttgattggattatgttgttcagttgggaggattccttttttttwtatagggttatattttcaaaaytattctctatttcaagttatcgagtttaatttcyrtggaggataaaaaaaaatcatattgttaatcaatcagaaatcatctttgatataatttttaagacagtgactatggtagcwtatytccgggrttcaagatatagccctgcaaggtttctttggttatgaaattcaaagttgatccaataattttctgtcactcttgtattggtgttcrtgaactgggttctagtcacaaatcttyaaaagacattttttattcgttatggttggtgatttmttatagtatatatctgtacacagacaatgattattattta

SEQ ID NO: 424 - DNA, 401 bp, Glycine max
aatataatttttmtttacatttaaaaaattacataatcttttattatcaagcaaaacatggttttacaatatatttcaaaatatttacatattcttttaccaattaaatttcaatgatattttttattagttacagtttccaaatgcaaatgattgctctkattatgacatttgttaaggaaaaaaagaaaagaaaagtayttattatatttaraacaatttttgttcaatacttaattttttatgaaaaaaaaaatattcagagctgtgggwatgataagacatttcaatttttctataatttattttgatagcttataaacttayttatccaaaattaaaacgttttgcataaaaacaacgacttgaaaaactttatgtaaagagaaagtgatcgaaga

SEQ ID NO: 425 - DNA, 401 bp, Glycine max
atgatccctaggcacatgcattgaattatactatacaaaggagttaagagtttcttggcagaaagtttattgactttrgtgttttatgctgattcaactgaagtaatttggctcatttactagttaaattagtactcttgcttagttttttttttttttttatcttttactaactacttaggtatttagctatctaagtcmcttgatcctggcctgcatagccttgtgagatacagatgctactgaaaatcagtttaccataacaaaagtagtcttctgtaatccacaatttcgattttattcggtacggtaaaattaatatacaattgagcattatatccaatgtaagataaaaagattagagtttatcagaaggaaaatccaagtgccaatcttattaa

SEQ ID NO: 426 - DNA, 401 bp, Glycine max
gatcaataattgattcaaaattttcaaaatgttttgatttttctttctataatagttattttttcatcatatgtctaattatttgaaaattacttcagttaaaatttgattgtgattttgattgataagaagattcatttcattatccatttattktcatattgaatattttacatctttatattaataaaagtaaagaartatcgaaagagattcttatatatttgagcggaattattttatatttttttatcttttaattaaaaaataatttaattatttcaaataagaatatgtacttgtcctaactacatcaattacaatatttatatgactttatgaattaaatagataaaaaaawttattttttgmtcaattatataatattttccctccaaaac

SEQ ID NO: 427 - DNA, 401 bp, Glycine max
gatgaattctttttctatacaaattaaattrcatgatttgattttaacttataaaaaaaaacttaacttattttagcttttaattttctttctcttatttyaattatacattgtaatcatataaaataattaaataattgaacacaaataattaatatattgaagttaaaattaaatcatttgaataaaattaatgtattragattaagattaaatcatttgaatataatttttgtatyagtraagtctcttttcccttgataaatgaagggttaagaaaaaaaaaatatgatggcattaatgcatccatctacatttactaacttattgtaacaaattattttagctgtttgtctattaaatcaagtaataaaagaaagatagtgctagagagtggcatt

SEQ ID NO: 428 - DNA, 401 bp, Glycine max
taatggttcgattgtgaacaatttttttccttgtaaaagaatgtaaattttacyaaaatataatttttattattaattatcttaatgtgattcatattattattattattattataaaawtaatatattatgaaatatataaaatatagtttggtgacgattattraaaaacaaaagaggaarcatatgcaaagtggggcragatagtggactagaagagagagaaaatagaatawaaaatagatattttgatcttttaagtagtttgtatcgagtaataaatcatgaaaaatttattttttcmatttaacatttaagttttgttgttttctaatattttttagaatyaaacacgaaacaactgaaattatcccatccaataccacatttttttttycaaa

SEQ ID NO: 429 - DNA, 401 bp, Glycine max
cgatgttcgatgtacttttttttggtaagtgattcatttctcactgacktatttaatacaaatacactaacttttcagggtggctcaacttcctttattgctcctaaaacaaatcatggtgctgctgcatctgaatgtccttctgatgcaagggcaccatgttttgctagacctgcaagggaagaatcagtcttcacaaaytcggtgatccaaccaatggctcgggagcagggctctgattttagtacacttgatcctcctacatttgctaggccaaccagacagattagaggagatcagttacattctgaaaagaaaacgggctattctgaaattggtggttagaactttgaactcggaaagtcatttgaagtaataatagttgaatagctataagaawt

SEQ ID NO: 430 - DNA, 401 bp, Glycine max
tgcagaatcagaaggcaaatatgttatcacagtggaagttccaggtgtcagtatcagtgacataagagtggaggttgatgaactaaagtaagaagaatctctaatatacaccctcatattaattgtaatactctttgcaatttgtggcaktaagcatttagttctccctaatcagtagaaaagggagtggtgaaggaaacrataaggcataacaaaatattgttggatactctacttttgtctatgtcattattgtgtttgagcttttctttcgtttgtgtaccgggggagggtcttgtctattaatacaagctttatacatcatttctgcaktgtaatataaagcataaattctggaagtgaaacgctraakggaaattttaatgttggacattcgtggt

SEQ ID NO: 431 - DNA, 401 bp, Glycine max
aatcagtagaaaagggagtggtgaaggaaacrataaggcataacaaaatattgttggatactctacttttgtctatgtcattattgtgtttgagcttttctttcgtttgtgtaccgggggagggtcttgtctattaatacaagctttatacatcatttctgcaktgtaatataaagcataaattctggaagtgaaacgctraakggaaattttaatgttggacattcgtggtcatagatctttcgtagtataggacctcctttctttgtgataaaagagccaatgtgtgaactgtgacaggttgtgtgttaaaggyagacgctctactagctcttggacagttgsaggttgtccaaatgcttcyttttcttcatatcatcggagggaaatactatatggac

SEQ ID NO: 432 - DNA, 401 bp, Glycine max
cagtagaaaagggagtggtgaaggaaacrataaggcataacaaaatattgttggatactctacttttgtctatgtcattattgtgtttgagcttttctttcgtttgtgtaccgggggagggtcttgtctattaatacaagctttatacatcatttctgcaktgtaatataaagcataaattctggaagtgaaacgctraakggaaattttaatgttggacattcgtggtcatagatctttcgtagtataggacctcctttctttgtgataaaagagccaatgtgtgaactgtgacaggttgtgtgttaaaggyagacgctctactagctcttggacagttgsaggttgtccaaatgcttcyttttcttcatatcatcggagggaaatactatatggaccat

SEQ ID NO: 433 - DNA, 401 bp, Glycine max
aatcgtgactcaaattaatccgatcatacaatcgatatgactagcaaaacgataatcatgttaattacttaacacctgatygataggatcaatattaagtataagtctaaaagatttagactaaatataatataaatcatttatacactaccgtacaaaattatacatatagaacattgaggatgactctatgtaggagawgattaaactaatcacatggttgaagtygacttccaagtatcaatcatatttgataatttcaaacarggrtctctatattctcatgcttctatattttggtggtctcctataagtgcaaacatgtcttcgtctctcaaagrggtatraattygaaactcacaaatttagtatttattatttatataaaagaaaaaagaaag

SEQ ID NO: 434 - DNA, 401 bp, Glycine max
ttctcacaaaaatttataggatattgagataagagaagataaagaagtgacgtgatagtacgaaagatccaaaaatagtgttaaaagaaattactgtagaaataacattattaaaaatttctatagaatgaatgctacaactagtatttgggattttcaaacagatgttaattaacaaccacatataactatayccacgayactttttttatttttaatttctacaatttcagcgcagcacagttataggtccatctgtttttgcaattttttgttctagaatgacttggttttgaatatcacattagatatttgattagtttaggtcaagtatatgagtattacggcaataaagctattcttctagattttcacttgacaatttttttataaaaatatgt

SEQ ID NO: 435 - DNA, 401 bp, Glycine max
tggtgtataatgccgtaaccagtccccaacgtaaacctgaagcataaaatagatatgatgaaactaggcaagagattgaaataacaaaggatccaatttcaatggctaacttttgtggtgtggttctctcaaacttcttatcgattggtatcagagggtttcaccatgttctcaactgcaaacgagcagtggagatcgtgrtgccgacattgcagtgttcacttggaactaatctaagtgctgcaaagtgagatgagatgtttggattcaattgcaagataagggacttgaatcccacattggaagtatgggattctggtatagggttagaaagccctgtctccaactacaactgctagtttttatcatgtggttctcccaagtttcttatcatgtcgtat

SEQ ID NO: 436 - DNA, 401 bp, Glycine max
ggaaaacaatgtcagtttgtggttacgctggccgaaatttgaaagtggaagtaaattagtcaagtatttaacttggctagccatgaaggttactcgatgatgatataaggatgatatgattttgctgccaactcwatccttagaagtgaaatttataacttggctgcccttactgtatcagtaatggcatcttattatagygtctagattgttttaaataacgtttctagactaatcttagtaaatactttattttccaaaaataattcgcgaactctggttctatgtttttcctacctatcatttctttttcaagattaatagattggattttttttggcattcagattcataagaaatctcaggtttcgaatggggttatatggaccacgtaaatttct

SEQ ID NO: 437 - DNA, 401 bp, Glycine max
acaagttgtatctatgtaaaacattttctatatagataagaaaaaaagggagaaaaaaatttaaagagtattgaaatttcatgtttgaataacgttaatacgttattagtcatttttatccactcacggttccattaaaaaaaagattaggcaccgatcatttgatcatcggattgactctaattttacaaaattaacttygtatakaatcaggcaaaacgatttaatatcgctaaaagcaaaataacacacctatacatctatgaaaaaaagattctcaaatgcaatcatgaacataataactcctctacacaagaagcaaacaagaatattgtatcccatttgcttgttacttgctacttgttatttcaagggtaaaaattccaatacatctgtttttc

SEQ ID NO: 438 - DNA, 401 bp, Glycine max
tgtatctatgtaaaacattttctatatagataagaaaaaaagggagaaaaaaatttaaagagtattgaaatttcatgtttgaataacgttaatacgttattagtcatttttatccactcacggttccattaaaaaaaagattaggcaccgatcatttgatcatcggattgactctaattttacaaaattaacttygtatakaatcaggcaaaacgatttaatatcgctaaaagcaaaataacacacctatacatctatgaaaaaaagattctcaaatgcaatcatgaacataataactcctctacacaagaagcaaacaagaatattgtatcccatttgcttgttacttgctacttgttatttcaagggtaaaaattccaatacatctgtttttctctttt

SEQ ID NO: 439 - DNA, 401 bp, Glycine max
ctaaaaagaaaattagagaacagagagaaaggcgtaaattctattgttgtttatgtttagacacctaaattcaagcgtctctcatttttgtcacatcttatcaccaatcatttatctttcttcttttcctagcttatcactaattcagtcgtaagggataccaaatattaatttactttatcaaacagtattacttgctcrtagttaacatgataaaatamtttcggtaatttwtcacgtttaaaactacatagtgcatkgttttaccttctaactaatttaatcaccaagtgtttatgctttcatagaccttctgatttatattagcatgtattcggaattctttttctctgggaaatacctgtgaattgtcatagttgtaagtgttgaatggtcatata

SEQ ID NO: 440 - DNA, 401 bp, Glycine max
aatattatttaaaattgtgtgacctgatatttcaaggtgattctaaatcattatttaacatgaatcgaaacttaatttgtcttaaattcaaaaaatgcaagagttgggttgagtgagcaattgaaaactcaggtttcaagcatgagagaaagagaaacggggctgaagtggaggcaaacaaatctagattagattctagcmggataaaatgccaaaactcaaaatccaagaagcaaccctgcagctatgcttcaaaaattcaagctttccaagtttttgcgtgcaaacttacgttcacgtccctctcattggaattgaatgaaaccccacacattaacaaagtcactttcaaaaagacactttcattgtccctccctcacctttttcccatacatgaagaa

SEQ ID NO: 441 - DNA, 401 bp, Glycine max
agcaccttctctgtttgaaataaataaatattcatgamacataaaccttgcttttcatttgtatggtgattttttttgtcttaacttaacactttgattcattaagraaaagaaatcctgactaatttaaaatttgattraaaaataartttgataaaaraattatttccatcaatgatcgarttcaagtactacccaaaygatttaaccwtaaytttagcatattaatcacaaatattcaatcacttcattargtgatatargatattttcatatagctgtattttagaaaattattcatctcsaattcatttttatataggtagcaattctagtatccawtattcttatactttatgtataggtagacactcattttcaaattcattatccacatttta

SEQ ID NO: 442 - DNA, 401 bp, Glycine max
ctttcacatatagtatgaatgcataccaaacatgaacatatatagtggtgtatttcaaaagataacacgtttacaatttagaaatgaagtctcctgcttcctcacatgtcaccatcatcaagtattaaatatcaaaacaccactgagaagagaaaacggatgcactggagatcaaagtatrattagaacaaacataacagscatatcattcgtgatcacctaatcactgagaaccgaatgcaaaaatgcttaaaattaaacctttttaaygaattctttggtttaagaaaatacttttatattttaattttacatataaaaatattatattatttttgtaagmaaattactcgaacttcctttctattttgcattttttgtacattttttctatgtaatta

SEQ ID NO: 443 - DNA, 401 bp, Glycine max
gattcgaatttttattagaaaaaatatattgtttgttgtggattattatctcttaaaagttatacatataagaaagacaatcaaacaatttaattgaaattatttttatatttttcatagaacaaaaacaaaaccttatgtttatgatggaaggattccattytcaactccttcayctccactttgccaaccaacttcaarcaattgcccattttgttttgtgactttgcgaattgcgatgatggaaagtaagagctaggtggctaatatgatattacctatatatagagagagagagataggaaatgaaaaacactgcttaaattaaatgagaaaatcggaaaggtcaaacctaagtagtgccacttaggatttcgtaggattaaaggaaaagtataaaa

SEQ ID NO: 444 - DNA, 401 bp, Glycine max
aacactacaaraattccggctattacctaaaacccactgtaaatcaaaattaaattaccawcaacttacggaaggctacttatccctctactataatcttgttgatatatatatatatatatatatatatatatatatatatataaatcracratcatgaaaaaamctcagcaatatagtggactaaggccaagctcattrtaattygaggataatacagtgtgctcttaatttcgtcagtaatttaaccttggataatagcaaaggaaaagacgttagtaattttagtaaaaatacattcgcagctagctaattgttaatgcttaaaggtgtgctgaattaaatggtggtttagagcaaactaactttggtgaaatcataaatttttctttgctggataa

SEQ ID NO: 445 - DNA, 401 bp, Glycine max
ttaaaggaatattactgytaatttcatatatttattgaaacgaatcaaactaaatcaaacaacaaaataatcatttagaaaataatagcattcatagtaagtaataaatatatgcatcttaaaatctatgcaacaaacatttttttttttctgaggaagttcaacccwgctcataatttagaacgaaaattaaattacacmtagtactccaaatagaaaagtcgaaaataaaatggtaaagaaccacttataaattaaatttggacccatgatggtaatggcccgcatgagcgaagaggcaagtaaaacctcatcacacattctgtgaatgtatcctttttctttctgcccatgtatygggttgccacttcggctttgcatgcattgacgatatgaaaatt

SEQ ID NO: 446 - DNA, 401 bp, Glycine max
gcaaataaatttaaataccagtacagaatgaaaagtagagcatagacatgaagacagctttaataaaatcaatggtaagaaaaggcataaggattcagcttttaattttatatcctatgcagattttattacaaagtataacagcrgaccatcctcagcttcacaaagttttacccttacatttacttgagtcatgacagragtcattaaaattaaaaatcaattcttcaatgactataaaacagctttttctcattttgatatattcaatactttcatatttacatggcaaaatttaaggctctagtttttgaagaaggaacacctcacagtaaagatatgaaaaagaagaaaaaaaggatcaygcaatgaacaattatctattttagcagatgagatgt

SEQ ID NO: 447 - DNA, 401 bp, Glycine max
aagatactaaagattaaatatagtcatttctctccatttgagaaacttagacagtagatttatgaatggtgttagatccaccatatctgcttccccttctcctaagaacattatgatttgttcaagcatgtgcacacctacagattctcatattgctatacctaatacttttacaacaatgacttcctttgagatcagaayaaatgatggtcagcaaggccatttaataatgaagtctttctctccttcaagaaagggggaggtgtctattgcattgtcccaagattcaacaacagtagccctacatggatcaaacaccaccataatgtcttatcataaataatctctataaacaaaccatttaaatcttaatctttcttaatgatttaacttatagtttt

SEQ ID NO: 448 - DNA, 401 bp, Glycine max
ttctcatttccaatatcaatccccactccactcattttaatttactgcgtccttccctcaaactacaaacaactaattcaatccaattcaccctttccacttcaccaacacaacccaaaagtcaaaaacttcacacaaagccggsccacaaacataagcttcacatttcacrcggcgctattactacaaaaagaaaaggtwggaaacatacacatcaaaatgaaaactttatttctgcatcatggaaaggtatagaaaacaatgatatagtgacaataaatgctttgaataaagcaaraaagktatgaagctgaagaaatgctttgaatgtaaaaagaaactycgagagagaagaaaaaratgagataagccaaaaggaatagtgagagaaaatggaagaa

SEQ ID NO: 449 - DNA, 401 bp, Glycine max
aaaagaaactycgagagagaagaaaaaratgagataagccaaaaggaatagtgagagaaaatggaagaaacctgattttggtgaagcgggtttggagagaaagatgaatggtgaaatggagaagcagttggtgactrcataattcagttgtaatggcagagagacaaaatcgccaccgcactcgctcaagccataataccrtctctatccctcgtacaaaacatttgtaatggaaaacttgagctatcatcaaccaatagatctgacaataatcagtttacacgagtagtaaatatgcaamatwaattatatttatggttgttatttttaaatagagtctcaacattagtaatgatatttcttatctttttttcccatgtttwcattacattttttacact

SEQ ID NO: 450 - DNA, 401 bp, Glycine max
ttcttctcarttatttgaawtaaatccttatatatgtatcactcatgcaatgagggtgtttgcacamaaaaaactwgctaacctcttacctaatcctactcataaaaaattgttcatttgtaaccgtcacttggatccgatgttaagctacatattaatgtccatttatgccaagacatctcatgcaatgtgtgttttttmacatttgaataggctttgcatgagtcgagaccaatattattcattttatttttttgctaggcaaagatgattaatagaaggacttgaatagagcacaaggtatacccacatcaaaaaacccgaaagaacaacatacaaagataataacagaacatgctcgaggagtatcacaagatcaatacatatattcctaattcaca

SEQ ID NO: 451 - DNA, 401 bp, Glycine max
tcagaagtagatgaractgttgatagatggcataraaagagtaaagtatactttgatagtgacagtgacgakggtgaaagaaatgaygttacagggaatgcaggyataactaccggtgcggttacgttggaggagcaagaagctctggctttgaaattgttaaattccatgcactcatagratatgcgtaattcagctgtracattttgtgacagcaaaaacgggtggaaagagagcaattcctgaaacatywyaggagttctgttaacaaaaaattttgatctcccaatttttttgtcatctctttcaagaaaggtagacatagaatcaatttacttaattttatttattttaactaaaaaaatgggagtaamggacatccttatgtgtaccaaacacga

SEQ ID NO: 452 - DNA, 401 bp, Glycine max
gtgtgataaatratctatttaataaaataatttatgtttgatttttatcaartgtaaaattttcttaaaccataataattacgtattacaagagaaatcagtttctaatctaataagttaagaaacatatatcatctctaattccatcactgaatttggattagcattttttcattcagaatggaagttgggtttttaaarttatcataattttttacttgaacaaggaaagctaaaatgtaagttgcattttgaaagctttctgattttcatcttagctttcctagtttaatatgtttttttaataaccctagctttatgttaaaargtgtttttttaatctttacagtgaaaagactttaattaaattacatttttccgaaaccccacctaaatttgat

SEQ ID NO: 453 - DNA, 401 bp, Glycine max
acatagcagaaaaggtaaactctaacatgactgaaaccctgttcggataaactattcaataagcacttrcagaataaggaaaaaaagagtgttaaatgaattaagcttctctcataagttaaaatcaacttttatagaagttctcatttagcttctctaaaaacttattctaacttgtgcacacgttaattttaacttacrgacgaaactcaatccattttacctacttattttcttctcttagaagttcttgttgagaagttttcccaaataggacatgattttactatgcctagggtgacgttgataggtagttgttagcaagtccaaaaatgaaggtctagcaaaggaaggttttggtaaggatttkctcatttttctagtttgaatgactaatgtta

SEQ ID NO: 454 - DNA, 401 bp, Glycine max
cacaactactgactaaatgtttacatgtaagagragtgcattcattgagttaaaagtttttgggggccatatcagtaatttacacttttattatggcctttagagagttaattacttctattgttagacacattcttaatctattgttaaaatgtcttggggcatccatgcacccaaactaatagggagaatagtaraacmagccatatttataacagtgtttcccgaggacacctgatcatatgcatttttcactcaatgaaaaacaagatagtgaagccartaagttaccacttaccagtatgtcagtatcaaattacttgcccaatcattaacgaacagtagaaaagaatagaaatcataaaattcacctcatgattcaaaggtttccacaaaaggtc

SEQ ID NO: 455 - DNA, 401 bp, Glycine max
gagggggggggggrrgrrgggggtttagcgtttcctgtacaattaaataaaaacaggaaacaaattgaaaacaaggttgtatttttgtaattaaaaagtgaaaacagaaaataaaagygcaagtgatcaccccyttagtatttttggcttcttatcatgagctcatgcacacatattaaaaggcaaataaataatttaccragatgtgtggtcaataccaactaaacaatttacagtatatatagaaccaacggtgttcataacatatgtgaataaaacccaatcatcatatgaaaaaagaataaatgaccactttgtatacccatcaaattaagtaaacatcttgaaaatcaggatgtttaatagaatactacgaagcagataaagacaccgattaattg

SEQ ID NO: 456 - DNA, 401 bp, Glycine max
ctcatgttcatattcataaataaatagtactatatcatcaccctctttgkgttatttatttcctacttgatcaacttacagtacctgatttctttcgtatttgattggattatgttgttcagttgggaggattccttttttttwtatagggttatattttcaaaaytattctctatttcaagttatcgagtttaatttcyrtggaggataaaaaaaaatcatattgttaatcaatcagaaatcatctttgatataatttttaagacagtgactatggtagcwtatytccgggrttcaagatatagccctgcaaggtttctttggttatgaaattcaaagttgatccaataattttctgtcactcttgtattggtgttcrtgaactgggttctagtcacaaa

SEQ ID NO: 457 - DNA, 401 bp, Glycine max
tcaaatccttaaccacatatttatgagataaaaytatataccaattacattagtgtgaagaaagttattagaagactttgcamtcgtagtggaagactasattagagtatcaactgctctctctattttgctgggttgctcagctgatagcctcctctattatggtttggcttgtgtcagaatgatggcattttgattgtkctttcatttggttaacagatcacatttatttcaatggttatttttaaattttctctttattatgttcwcccctttgttggaaatatttctttttatttatcttttaaataaggagtttgaaatataatactcagtcctcgccaatatgtatgcacttttactttttaaacatgttcaaatatggtacttggtttttttaa

SEQ ID NO: 458 - DNA, 401 bp, Glycine max
agatagtatttggataatttaatattaaaaagaaaatttcagtaaattttatattatttaatttgttttatttattatccatcaaacaaygtataagacaaaaaaaattatcttgtaacttgacttgtgttgttcttatgttgtatccattaaaagcaccctaagtgaaaaataattgttacaataaagtagtaaaatgtrcaattaaacaaaaaaattattaaatgrgctttatargttttcctacattcatatatttgatttatgtttatgttaaaatttcttaacattgagacaatgaagaatattttgaaaatataacaatttattttaacttgtcttttaatgaaataatttattgaaaaatakaatcaattctttcaattaaattttattaaaaa

SEQ ID NO: 459 - DNA, 401 bp, Glycine max
aaaagaaaatttcagtaaattttatattatttaatttgttttatttattatccatcaaacaaygtataagacaaaaaaaattatcttgtaacttgacttgtgttgttcttatgttgtatccattaaaagcaccctaagtgaaaaataattgttacaataaagtagtaaaatgtrcaattaaacaaaaaaattattaaatgrgctttatargttttcctacattcatatatttgatttatgtttatgttaaaatttcttaacattgagacaatgaagaatattttgaaaatataacaatttattttaacttgtcttttaatgaaataatttattgaaaaatakaatcaattctttcaattaaattttattaaaaatatgcaaaaataarcattacataaaca

SEQ ID NO: 460 - DNA, 401 bp, Glycine max
aatttattttaacttgtcttttaatgaaataatttattgaaaaatakaatcaattctttcaattaaattttattaaaaatatgcaaaaataarcattacataaacaaaacaacattgaaaataaatattatagattacacaacaatttaggactaggttaaataattcaatatttttctcaaattatgttatatartatcytataatctttatattatttctcctttttatattttaaataagttaaatttgattctgtaraaaaagataaatttgaaaataaatttatgattttaaaaaatcttgaaaatctatatattttaaggcattgttgtagggagattgccacaatttccttaatactagatgaaattcgtcgacgcacaagccataattcagca

SEQ ID NO: 461 - DNA, 401 bp, Glycine max
atgaarttttttaaagtcataattactgacattatataatttwwaaaaaaactcacataatttatatgataaaatataagagttaatataatttttatataaaaagttttgtcgctgcatacatttcctttatccaaaaatccaaatagaagtttcgttttcggttaatttsagtgcgaagtattgttttgggtctgtttscaaccwgcaatttccaaacgtacggacttcagagccatgcgcttgttgtatggggcatgtgctagggtttggaccttgaatggtgtrgtgaatagaaaatatactatgtttggtttcataagtggaaagaaagggraaaaaaatgattttttagttatttggtagaatataaagtgaaaggaaaataagtttctcttctc

SEQ ID NO: 462 - DNA, 401 bp, Glycine max
atttgagtattgtataaagtggactagcacttccttcattttttattggctaaaggatgaaagtagctagactgctcattggttttgaatacaagaaaatatgtcctttcatctctgacagctagcttcgaataaattctgaaatatcacctattcagtgtctgattttctatatatagtttarccctgttgatattgcawatttgcgttaaattatgagacgtattagcttgtactgttgatgtcactatttattatggtaaagtgtttattgatcttgatgttcagcattggaaatttaattgtttaagttggctttttcttttatgattggcttaggcaataataacttgaacactcttatcaaatcaatgcatttttgtaggctacaarcaacttca

SEQ ID NO: 463 - DNA, 401 bp, Glycine max
atcagaactgcagtggcagtctgaactctgtactccggagatgtgataataaggtgtattttgcacgccaagcttctgcttctcttggttattttatgaggcagacttcaattgaagaggtacttaaatgttcttattattgaaatagttaacgatgttcgatgtacttttttttggtaagtgattcatttctcactgacktatttaatacaaatacactaacttttcagggtggctcaacttcctttattgctcctaaaacaaatcatggtgctgctgcatctgaatgtccttctgatgcaagggcaccatgttttgctagacctgcaagggaagaatcagtcttcacaaaytcggtgatccaaccaatggctcgggagcagggctctgattttagtaca

SEQ ID NO: 464 - DNA, 401 bp, Glycine max
acctgtattcrtttatattttacttatgtataagrttaataaaaaatttaattgaaacagacaaacataacattrattcatttaaactcaggtcataaataaagaaaattataaaaataatcatccaacttagtgattgttagagcttrgagttggaggaccaagcagyctcctaagagagaagaagagagcrcgagagaraaytaagggaagaacttttctgatatattaattttagcatagcrttgcagaagcgcttcttacactatataagggctactaagggacaagttcccracarcaataacaagaaaatacacaaatccargraatatcctaacagaatgatattcccttattcmctgctacaaaggcactaccagaargatacgaatcctact

SEQ ID NO: 465 - DNA, 401 bp, Glycine max
taagatgatatagtaaatacaagaacaagaacaatcaatatatctttagtcatacatgaaagaatataatatttggatgctttcaattttcaccrattcaaaatgtcaaamtcggggtggttatcttcaacgtcatcctccaaatacctatctaatttatttttttgcacctcacccttytttttcttcactttttttttwaaaaattcatcatcccaatcatcacccttatcacctttgtcatcattatgttgtgagatcatgtttgaagycgatgtgctagaattgactgaattactactagaatgagaaatggaatgctctrgtacatattgctaaattagtttgtgaataagttctttcaattttttcatcatgtccatgttcttctcaacaccatg

SEQ ID NO: 466 - DNA, 401 bp, Glycine max
gttacaccctctaccataaatagtgataatataaacataaataaggtcgctgacagattgaagttcgatgaccatcagctgtgcacaaataccagaaagagacctgcagcagcagccaatcttgatgattccagaaaacctaccaagttactgaatatgcgagtgcaagaaaacttcagtcgtatgactaggttgcctggwgaaaagtccagtgtggaattgcaacgaaacacaagaacactcgaactggatccacacatgggcagtgctaggagtaggtgttgtcagcatgaggcacaaaatctaaatcctggaagytatcctgctgtaaattcttttaaactggacggcatggtaacatcaggtcctgtccgacttggtcctaaaagagcgaagcacat

SEQ ID NO: 467 - DNA, 401 bp, Glycine max
ctcaatagctaaaaactgaaggcttttatgaaaaacaacgagcaarcacyggtgatgaagcagaataaaaaagtaaggacttacgaagagaacatcttgaagtaagggttgcagcatggttgaaattttgagtgcttttggtgacccaacgaacaatgtaatgaaactcaaaaggaggaaggagtcacggaggcgcggtgswaaatcagttcattattgggcctccattttttggtttcagggcataatattattgggccgcttaaacctcttgtaagtgttattcttcrttcacttaatatattttaaaaaaaattagattaaattactcatttgattctatagtttcatgatcttatttttttagttcatacgrtttgaaattggtatttttaatccct

SEQ ID NO: 468 - DNA, 401 bp, Glycine max
tcaatagctaaaaactgaaggcttttatgaaaaacaacgagcaarcacyggtgatgaagcagaataaaaaagtaaggacttacgaagagaacatcttgaagtaagggttgcagcatggttgaaattttgagtgcttttggtgacccaacgaacaatgtaatgaaactcaaaaggaggaaggagtcacggaggcgcggtgswaaatcagttcattattgggcctccattttttggtttcagggcataatattattgggccgcttaaacctcttgtaagtgttattcttcrttcacttaatatattttaaaaaaaattagattaaattactcatttgattctatagtttcatgatcttatttttttagttcatacgrtttgaaattggtatttttaatcccta

SEQ ID NO: 469 - DNA, 401 bp, Glycine max
tatgagacgcatatgtgcctcttctgttcgggacacaattttattgttgtgccatgtttccattttactaactcttctagatagttccaaagtttttccctactatatattctctcttagaaccttcaggttctctcagttctattacttctattattattattattatacgattttactgttcttatatttgaatagcawgtagtcmactacttacatgttttatttgtatttattattataatatttttaattattgactttttracractcacacattataayatttcwtcgccwgtcagacctttttgtaagtagttctttatgaaatctcgacaatctrttttgattgcttttaaaatcaatgasgatctcacaaatcaacgagacttctcatatt

SEQ ID NO: 470 - DNA, 401 bp, Glycine max
aagttttacgatattgaaaccaaatacatattttcaattaataggaccaagaatatgaaactgaaacgggataaacccagaagaaattccaataatcgtgaaaaataaagtaaaaatggcatgactgcttcgtacgaagggaattataaaatcttgcaaatttatgcctgatatttatatttcttctaacatgaacattayacttgctggaaaaatgcaggaaatagagctgcaaaaccataataattttctgagagctaaggtgatctcttaattctctccaagacttatatataaagtgtatgttgagatgaatgataattaataatatatagttggttgatgatgcatgcatgcatgtagatagctgaacacgagaaagcacaacaacggcaacagga

SEQ ID NO: 471 - DNA, 401 bp, Glycine max
taatcatttataagataaaattgcaaatatatgtctaaaattatgtggtatatacatctaaaataaacttttattacctagaaaaagctaaaaaaattaataattccaaaagcaattttattttttaagacggtcaccattaaaacattattactagatacatattacaaatataaaataaattaaatattgatcagtgtsttctatgggcactagtgttcatgaaaatacgytggaatttatattgctattatttttatttaaatttcaattatgtaaaaaaaaaatatagtactagtgttcatgaaaataatgggatgcatttatatagatgcacttaaagtaaakgaaggattaattctcgttcatattaattattcaataggtataattaaatttaa

SEQ ID NO: 472 - DNA, 401 bp, Glycine max
tatatatatatatatatatatattcaaaatattaaatagcatattttaaactagttgtaaattattgttattattattaaatttgccaaattgattatcacaagttctacattttgtatgggttttatcaatgctctcttaattataaattaaatttggatggacatatgaaaaggaatctaccacttagatttaattgaygttaagtagtagtatttggtacggcatacggccccagtttttaaaacgttgtgtacagcaacacatccaaatcaaggttttaaaaaacagagtgggaggtsaaatggtttaattaattataattaataatattatttttatttttgatataatatattaaattatattaaacaaaaaatcacataatatttataacttca

SEQ ID NO: 473 - DNA, 401 bp, Glycine max
caatwctaatactaatattaatctgamttattaataatttttgcgcgcgtgtgaaatctwaattacttrtagttcgawgccaactgagaaaacataatcctgtttcatcattaaccaaatttataaacttcaacgactgtatgctagatcttagttttttttttttattctgctacaacgactgtaggtttctacaccgakatttttccgccaaggaaaaaaaatggttattattagtaagtgtttacctaaattttgaaaaatgtagagttctacaaaaatatggcaagtggtagtgattgtatacctamagaattagatagggatgcaaataggtaagaggatgacacgtaaagaaaaaatatataatgggaaacaaaacttgtatatgaatttatttt

SEQ ID NO: 474 - DNA, 401 bp, Glycine max
cttcagacgacatttttacattctgtgtgtgtgtttttgtcaatttcgtctatatttgcttctaaatataattgttaagaagaaagtaataatacctgaatctcacatgcatatatgtgtctattttgatggcatgtgaatcacacatttatctatattgaatttacaacaaaaaatttatttccatccttacaagtttgrtcgacayttcactttagatactaaaaatgaatatgcgcgcaaaggaaagttataattcccttgtgatcaaggttggtgcaattctagatattcttgtaaattttcagcttgcttatgctttgaggttcagaagtattcaggaggtattgggtgatgmgggggataaacaacacttttatttttattaattttctttactt

SEQ ID NO: 475 - DNA, 401 bp, Glycine max
cgacatttttacattctgtgtgtgtgtttttgtcaatttcgtctatatttgcttctaaatataattgttaagaagaaagtaataatacctgaatctcacatgcatatatgtgtctattttgatggcatgtgaatcacacatttatctatattgaatttacaacaaaaaatttatttccatccttacaagtttgrtcgacayttcactttagatactaaaaatgaatatgcgcgcaaaggaaagttataattcccttgtgatcaaggttggtgcaattctagatattcttgtaaattttcagcttgcttatgctttgaggttcagaagtattcaggaggtattgggtgatgmgggggataaacaacacttttatttttattaattttctttactttatttta

SEQ ID NO: 476 - DNA, 401 bp, Glycine max
tttgtttctttcataagctaattgtaactctaacatgtgaatcttgaaaatgaatttgctcaagtataataattaataaaacaataaatatgtttttaccttattattctgtttaagctttaatttgaaagaattattttgtgagaaagagtgactctaactgaagagtctattgaactttaatacaagaatgagcttaakaacttgcatgtttccaaaaccaatgtcgtatatatttatatgtaagaaaatacatctaacaacaaattactaaagagtaaagacgcataagcgccatgaaatcctaaaattttaaaatccaattgacataataacttatttgaaatcctaaaattttaaaatgggtaacgarttaaacaaaaaagtagaatataattgaa

SEQ ID NO: 477 - DNA, 401 bp, Glycine max
aaaggacacatatgaaaaggaggaacgtgatggagtgcacaaagtcaaaagctaaatttatggagcaaaggtgaaagtggctgaaggaaccaagcatgcacatgattgaggtttgttgtctttggtgcttctgttacagaacagagaacatgcaacgtccgagtgggcccacaattggcccactaaatagttaggtgctcsctgttctgttgttagcccaatatgagtctgaaaggtgcgrgctgggacccaagatgtcacgtgtcatggcatgtgcgtcacaaatcgtatcaacaagaatgcttmttcattaggatcaagcattttcttttttagtaaaacaactcaaagcatttcattggtaagaatagtcttaatacaagatgatatgtaatgaaaaa

SEQ ID NO: 478 - DNA, 401 bp, Glycine max
tgagatgtttttacaaacytaagtttaacctaaacttaaattttcaaattttaatccaaacatrcataaatcattttgtgtctactaccgaataacatctagtttttcaccctcaaaagagaaaaaaaaaacttcaaaaataaaggtgcataaattaattttaatttatggagaagtttaattaatatattttacttattwtttttctataaatgtttatagaaaaaattatcaaacacatatccttaaatatttgttgatataaataaataaatgtgtgtagactgtagtgtataggactggaggaagttggctgtgagctgtcgcatatggactaaatagaaaagacaaagctgttgtctatttgttagtaaggaagtaaaatgctattgttatccatg

SEQ ID NO: 479 - DNA, 401 bp, Glycine max
tacattttagtttttggtattcaacaaaaattagagaagaacagacacaaatgagcaactaagaaaaaaaaatcaataggcaagaatgggtaggtattagaaatgctaggtatggtgttgtagaaaccactggcgtcgaactctaacttgrccacctttgggcgcaaaattcacaagcatgggcaccattgtagtgattgrcgtggtggcatcatgtgtagctgaccacgatatataccaagtgtgacatttttcgttgttggtttatcttgcaagtgatcttagcctttttttktgtgttaggtgttgtcatcttttatgatatataaacactcattattttaaacatttcacttatatctcttatttttctttatctctcttcctatatatcaaataaa

SEQ ID NO: 480 - DNA, 401 bp, Glycine max
cagtttgttgtacgtattttcttaaataattaacttagcaatacttgaattaaaagttaaaacccttcatataatagctcacaatccaatgatggttaaagagaaaaaaagaaacctaacaatggcaatgaaaatgaaaaccaagttaggatgcgcagccattaaccaacgatttttcccgttgtttaatttaagattttyaattttaataagctatctggatctaattctgcattgaagtsataccaaacaaaaataaaaaataaagttatcacttattatgccacttttagggggttggctgattaaaataagtagtattaataaatttccaagcccatgtgagtgcttatttttwwaaaaaaatatggagcgcacgttttgtatttatggacgtgaca

SEQ ID NO: 481 - DNA, 401 bp, Glycine max
tatcatcattttatacaatttggttattttaaaatttaaattaaagatttctaatgaaaatttaagtatcatttcattttattcaaattttaccatctargtctatattttattttatgacaaakattttaattagtacctgcattgtataaaataaatatttattttatataacaaaartttatagtaaataaatatttmtaatttatacaaattattttaaaaataaatattcttaatatataaattatattttaaatttatgattaataatttatagtgataaaataatattttaaattactaataatttmttttaaaaaatattaaaattcaaattataactaaaaatattaaaaaagaaatagtcaaattaaccacataaatggtaaaatcaagtt

SEQ ID NO: 482 - DNA, 401 bp, Glycine max
tcaactgaaagacaaaaatgaccatgtgcatagatagatctctcagaaaactaataatgcaatatgaagagataaaattgaggtttcttactgtagctgattcaatactgataatgccatgcaaatttagttgaactcgaactttaattcttgccttacttccatgggatccatggaaaggatcaatctaaatagaaatgrcaaacaaatgcataagcatccaaaaacaaggtgtaggcataagcatacataacactttttaatcactggcacaaggaatggcagtatctcaatattgagatgtcttrtattatataatagacattagcaaatgttagccaattgtcattgaagatactaaagattaaatatagtcatttctctccatttgagaaacttag

SEQ ID NO: 483 - DNA, 401 bp, Glycine max
ggtgtctattgcattgtcccaagattcaacaacagtagccctacatggatcaaacaccaccataatgtcttatcataaataatctctataaacaaaccatttaaatcttaatctttcttaatgatttaacttatagtttttcttcrtctcttactacctctaattatatcttccatctgattcactctctttctttagagmttctacaaagtcttcacacgtgtctaaaccacttaaggcatgattctaccatattttctacaacagatggtgcctaactttctaacgcaatcattcctaattctaccttgtgtgtctacttatccatcataacattcttgagttggcaattttgagctttattccttgttgaggttttaccactcaacagtgaacttcaa

SEQ ID NO: 484 - DNA, 401 bp, Glycine max
agtgacaataaatgctttgaataaagcaaraaagktatgaagctgaagaaatgctttgaatgtaaaaagaaactycgagagagaagaaaaaratgagataagccaaaaggaatagtgagagaaaatggaagaaacctgattttggtgaagcgggtttggagagaaagatgaatggtgaaatggagaagcagttggtgactrcataattcagttgtaatggcagagagacaaaatcgccaccgcactcgctcaagccataataccrtctctatccctcgtacaaaacatttgtaatggaaaacttgagctatcatcaaccaatagatctgacaataatcagtttacacgagtagtaaatatgcaamatwaattatatttatggttgttatttttaaatagag

SEQ ID NO: 485 - DNA, 401 bp, Glycine max
gtttttaacggaaagttaattgtgtctaaagacttgctatgtgtccactcaaaacatgtatagttgatgaatgatgtaggctatctgatgtacatgtctggctaaaaagtccacatctygtggctctcttgttgccttttcatttttttrataraattttaaccttttgtaattttaggagaaaaatagtgaaatcataakattaacacaataatgtaaggttatattgtgcatgtgtgataaatratctatttaataaaataatttatgtttgatttttatcaartgtaaaattttcttaaaccataataattacgtattacaagagaaatcagtttctaatctaataagttaagaaacatatatcatctctaattccatcactgaatttggattagcat

SEQ ID NO: 486 - DNA, 401 bp, Glycine max
acaaacatatagcattcaagagctatwcatattactgaatacccaaaactataacaacaaactaatgggctaaagttcaacacataaatgaggcatggatgactacaaaggaccaaagctaacatattatgaaatggggatgcaagwgtacaggagcaaattcagatctttaaagattattgactgaarggtaggtcaaamccgcagggatacaaagcatcaattgacattattactaaagtttgatcaaaaaatggcatwaaagctacagtctatttacaattaaaccttataaagccygataaacatagcagaaaaggtaaactctaacatgactgaaaccctgttcggataaactattcaataagcacttrcagaataaggaaaaaaagagtgttaaa

SEQ ID NO: 487 - DNA, 401 bp, Glycine max
tgcacttctattgtctrttttytttagttgcaaaaatgtcaccttgctttctatttgtttcctattgtcaaatacatgaaatggagggggggggggrrgrrgggggtttagcgtttcctgtacaattaaataaaaacaggaaacaaattgaaaacaaggttgtatttttgtaattaaaaagtgaaaacagaaaataaaagygcaagtgatcaccccyttagtatttttggcttcttatcatgagctcatgcacacatattaaaaggcaaataaataatttaccragatgtgtggtcaataccaactaaacaatttacagtatatatagaaccaacggtgttcataacatatgtgaataaaacccaatcatcatatgaaaaaagaataaatgaccactttgt

SEQ ID NO: 488 - DNA, 401 bp, Glycine max
rttttytttagttgcaaaaatgtcaccttgctttctatttgtttcctattgtcaaatacatgaaatggagggggggggggrrgrrgggggtttagcgtttcctgtacaattaaataaaaacaggaaacaaattgaaaacaaggttgtatttttgtaattaaaaagtgaaaacagaaaataaaagygcaagtgatcaccccyttagtatttttggcttcttatcatgagctcatgcacacatattaaaaggcaaataaataatttaccragatgtgtggtcaataccaactaaacaatttacagtatatatagaaccaacggtgttcataacatatgtgaataaaacccaatcatcatatgaaaaaagaataaatgaccactttgtatacccatcaaattaa

SEQ ID NO: 489 - DNA, 401 bp, Glycine max
ctaataaaatctcatattttgtaacttcattaaaaaccataccttttttccaacattcttgtctgcatggtgaagcaatttaattatgctcttaaagtatccggcaggtatcatgactgttgttagattccttacaaccgcacgcatagtttccttcaactctctcctcagaattacagggaaattcagttgctttttccwtgcatctacaagttgcaagagtaaaacaacatgctccataagctcacccaacgccctctgaaatattgaagaagcgatcacatttattttgattatgaatatgttcatctaaataaacaagagaatataggyttattcaaagattagaacatttkctaatatatatatatatatataaaagcacrcaacactaatgccat

SEQ ID NO: 490 - DNA, 401 bp, Glycine max
acattgrcaccccgtccaatactgttttctttaccccacatgtacctccttcaattaataaatcagggaagatatatgttaatgataggatccaattgcatgctatgggaatcragttgcacattagaagtatgcaattctaccaaggtttataaggccttgggctctctaactaagtataacggctagcttttgtggtgktgttctcccaaagttcttatcaattggtatcaaagctttccaccatgtcccttagcctgcacacaggcagcatgggtggtgacgccacattgcagccagtgggtgtcaacatagtayccccaaatttatgatttaagagatatcaacatctcaacaacatactgtatgtatctgttagccattattgggcatgkgtcagg

SEQ ID NO: 491 - DNA, 401 bp, Glycine max
gatatatactcctcccactttgtacacctactctttcaaatgaagttttctaacaaaactcaattataccctccctcaccaacaatgtgtraaatcagtggccttaacaaattagatcagaaatgcaactcagttcaaatcattcaaagtagaacttaaatgtatcmaaaaaatatttccaaataaaactagtttaacagmaaaattttgtaatgcaaccatttcctaaaaaatataaaatcaaagagaagtaatataccaccaccatcagaaattacacacacctaaagaggaattaatttacaccgttgtaaatcacacttactcttcaattattatgaaatgtaatttttgccaacaattgaattataattatatattaccaaaattatttatgccaa

SEQ ID NO: 492 - DNA, 401 bp, Glycine max
aaaaaaaggtaaactaggcagaggcgaaatgtgattatcaacacaacacccctaggaagaaaacaattcataacacattgttgaaagctcacttgtgtctacgtatcaagtactcaagcgtttgaagggcggcagtatgaagaaaatatccagaaagtagtttcaagtatgaagcaatggagacattaagttgattgttcwgttctattcccatcaactctctatccaactctgtactcckgtggctaaacaaatcgttcttatagttcctgaaccgctcatccatgccaataagaatctctaagcctgaaataatgcatmacataagaaaaamaaaacaaaatcaaaacgaaaatagaatataaagtagcaacataattcatatgctccatggtaatcac

SEQ ID NO: 493 - DNA, 401 bp, Glycine max
tcatagctttaaccgaatatacarttagacaaacttcaccaaaatatattaaagatacaatgcaatattatttgattcatcaaaaaattgtgttttctaatgttgagttaaatatgatggctggaaatacgaatatatgaataaaatttgagtcaatggrcccaatacaatatattaaaaggacaagactctacctttgtycagcataggtgaacatggatatatttaggcacacacccacatgattaagtctgaaactctcaacagtgaggagattgtttgtaatgttattgatagtaatttaytggaatggattttgatgaattttataggatcttttaatataaaatatgaattttgatgaatattttttgtttgtaatcataattatgawtttttat

SEQ ID NO: 494 - DNA, 401 bp, Glycine max
gaagatgttaatgcatataagcttaataaattatgtgaagaaacgttaaataggaagacagagagttagaataaattaactattaaaatattggaaaattttgtattgattagactcttttttttttttatctaaaccgtaccatttatttatttttatcttttttattgactctaataatcttgaatgtttctaaaaatytagtgaagttattaaaattttataaatctacccartcttttcaaattttataaactaatatgttataaatctattaaaattgaaattacaaaatttgtcataaaaatatttttaaaaaatcttaaaaattattacwttcatccaacttgtaaaatccaaaagatttattacaccaaactaatattctaaaatcatatttt

SEQ ID NO: 495 - DNA, 401 bp, Glycine max
ttgaaattacaaaatttgtcataaaaatatttttaaaaaatcttaaaaattattacwttcatccaacttgtaaaatccaaaagatttattacaccaaactaatattctaaaatcatattttaatacatctccagtttttatgctgtattttctcattttatttttgttatccwgtgattttgtttaaattaaactgaaatraatatatttgtatggtctagtatcatgttttttaaacaatttttctttaggtattcagcaaattaattaacttaacaaatattatttatttatctttaaatgaacattaaaaacaaaaaaaaaacattgatttaagattttaaaggaataaaacacatcgaaaactaaaaatatatttattatattatcgtatataaaaa

SEQ ID NO: 496 - DNA, 401 bp, Glycine max
accaatgaggtaaaatgaattcattttttttataaaaattaaaattaacttgtatacttcaatttcttttaaaaaaatcttattaattttcttttttaaatacttataaacttagaaattcagcattttttgtcttaaaaaacttgtaacaagatattacaattgaaaagttcttataagttaagatgtttctaataaacmattgtgaatgtatttatttcattatctaaattgcatttcttcacttcagagaaactttattttagagaaattattatttttttcttagtccccaccttatagtagccagtgacaaawaaattgacgtaaaaataaaaaagtaaatcctacgatttcatctttatttttgaatttggactacaagtytcaaaaagaatata

SEQ ID NO: 497 - DNA, 401 bp, Glycine max
tttcagtaaattttatattatttaatttgttttatttattatccatcaaacaaygtataagacaaaaaaaattatcttgtaacttgacttgtgttgttcttatgttgtatccattaaaagcaccctaagtgaaaaataattgttacaataaagtagtaaaatgtrcaattaaacaaaaaaattattaaatgrgctttatargttttcctacattcatatatttgatttatgtttatgttaaaatttcttaacattgagacaatgaagaatattttgaaaatataacaatttattttaacttgtcttttaatgaaataatttattgaaaaatakaatcaattctttcaattaaattttattaaaaatatgcaaaaataarcattacataaacaaaacaacat

SEQ ID NO: 498 - DNA, 401 bp, Glycine max
gtgttgaaatgtttattttgttttatgttaccattagaagaataataagttaccctatcgaatattcttttaataaataattgttttgtaaaatcttctgataaattaaaaattactatcacgtaatttatatttataaatttttattratctaaaattatgaatatgtgaataacattgtagtactacaatagagtggakcgtgtactttaggaggaaggcaggtaagtaataagttggatctgtcgccttggccggtttgtgccacgtgattcttgttctgctyaactgtggactcatcagccccaatttctgactttttgcccttttctcttgggatctcaaagttaggttttggataatttttttagtaaccaattaattagtaaagttataaatta

SEQ ID NO: 499 - DNA, 401 bp, Glycine max
ctattttgyaattttatttcatatggggttctgcaggggtgtgagaaatatgtaacattatttacgaaatctacatttatcaatgagttaagttgttattttgaaataagccaaaagccatgctattaggaaaaccaagatgcagtattcatgwatcttaatttgcatccacaatttgtgagacaagtgactattagcgtkagttttttaagtatatgatagaaatttgatttttaattacgagaaaaaaaaagaattcgtgagtaaagaaattactctttgaatagtactctagttttttaaaagatcagtcttataactttcgattatgaaaacactttgaattcaattctaaatctaaaaaaattgttgatttgcaatgatartattgtgttatcaga

SEQ ID NO: 500 - DNA, 401 bp, Glycine max
asaaatgtgtgtgtatgaaatggccaatgagtgcaaccttatgcaacagacgttgcytcagtragaaaacaatgttgcatacttctatatggttttttgtattttttttcttttctgtaaattccaagtataagttgccgttattagaaatttttttaggaaaacataaatatatattaatcaattactataatatattastgttggatttagaatgaaggcaacctttggtgaaaatgcatgacattttaatgggactgttttcttcatttgtgtttttcttttttgtagattgtaaatatccattaattaatttcctcaagttccacaatgattcccattgttttttttacggtcaatggtttccatggttagaaaaaaaattwaagaaatatttgcaa

SEQ ID NO: 501 - DNA, 401 bp, Glycine max
gtaacwttaaatataatattaattacaaaagataaartatttaaaaactktgatattatttttcaataatactatttttatatggtaaaaacaatttatttaagtaaaaattaataatttaatattatatgggaagtaatgtaataaatatataggtgttattttkaactttgaaacttaaccataaataaataaaaattwaaagataatttacaagtagtatattaaatataatattaatttaataaatcagtattagttataaaagataaaacatttaaaaacttctatattgttttttaataatattatttttatatggtaaaawtaatttatttaaattaaatttaagaatttaatattatttgaaaaatgatttaacatatatgtaattgtaattt

SEQ ID NO: 502 - DNA, 401 bp, Glycine max
ttcacatgattgctgctcactttgcacccaatgatgatatttcaactaccaacgttctgcctatggtaacatattatgttcgtttacttatttgttcatggctggttcatggttcactagataatgatggaaaataaaggaattcatttgaattcagttatgtttttctcgacacatgggaattatttgkgagttagatayagctaagtggggaaattgaacttatgtttctcatcttttgctaactggcccttgttctccttttcatgtgaacagaaaaaaccatctaataggaatcttcatttattgtaatcataggacaatcmaactgcatattatttgagtattgtataaagtggactagcacttccttcattttttattggctaaaggatgaaagt

SEQ ID NO: 503 - DNA, 401 bp, Glycine max
caatcmaactgcatattatttgagtattgtataaagtggactagcacttccttcattttttattggctaaaggatgaaagtagctagactgctcattggttttgaatacaagaaaatatgtcctttcatctctgacagctagcttcgaataaattctgaaatatcacctattcagtgtctgattttctatatatagtttarccctgttgatattgcawatttgcgttaaattatgagacgtattagcttgtactgttgatgtcactatttattatggtaaagtgtttattgatcttgatgttcagcattggaaatttaattgtttaagttggctttttcttttatgattggcttaggcaataataacttgaacactcttatcaaatcaatgcatttttgta

SEQ ID NO: 504 - DNA, 401 bp, Glycine max
atattgcawatttgcgttaaattatgagacgtattagcttgtactgttgatgtcactatttattatggtaaagtgtttattgatcttgatgttcagcattggaaatttaattgtttaagttggctttttcttttatgattggcttaggcaataataacttgaacactcttatcaaatcaatgcatttttgtaggctacaarcaacttcaaagttttaaaacctaagtgtttccttcatctttgtccctttttgatacttaatgtgtccctttttgatacttaaagtgttttcttttatagcttttgttttacaatgtctaataaactaatctgtacgtgctatccttttttttttcttgaatatttgtttgtaattcattttgttcrtcaattttcctacc

SEQ ID NO: 505 - DNA, 401 bp, Glycine max
acaatcgatatgactagcaaaacgataatcatgttaattacttaacacctgatygataggatcaatattaagtataagtctaaaagatttagactaaatataatataaatcatttatacactaccgtacaaaattatacatatagaacattgaggatgactctatgtaggagawgattaaactaatcacatggttgaagtygacttccaagtatcaatcatatttgataatttcaaacarggrtctctatattctcatgcttctatattttggtggtctcctataagtgcaaacatgtcttcgtctctcaaagrggtatraattygaaactcacaaatttagtatttattatttatataaaagaaaaaagaaagtgttagaaaatatctaattaagwgaat

SEQ ID NO: 506 - DNA, 401 bp, Glycine max
atgatgtcaattaaataggaaaaatattttattatcataaaatacaattttggggttctacctcctcaataaaaaaaacacaattaatatagaaaggtttaaaatcacttatatgtagtgatattaataaaaaaatagcatgcccctccaattttttgttccaagctttgccactgctagctagtccctctactcgttttstaacttctattatatcactattggatagaggatacttgggaggtgggtccatatataggaagattctttgtttctatccatttcaagtgtcatctccctctttttcattctctgcttttctctatcgtctcacctaggcctgtattcctttactatatcaatttttatgagcaagtcaaagcaccaataaaatttgcaat

SEQ ID NO: 507 - DNA, 401 bp, Glycine max
ccaggaaaaaaaatgctgtctactcagtgactactaaagacagttgtcagctggtggctggtgctcaattttactaatttgaatttatcaattgatttataaatatggccatctcttatatgtatractggttttattttaatcctattgtgattggttctgatttcatagtttgtattgatgaatctattcaaatctgtwacagggcgttatgttgctccagaggtatatagaaatgaggaatacgacacaaatgtggatgtattttcatttgctctgatattacaggaggtaaaatcattattgctcatctttggatgcatgctgatttttcttattttagtgctttttaatgacttccaaattaatgatttacccttattatgtgaatggctgtatct

SEQ ID NO: 508 - DNA, 401 bp, Glycine max
gaatggctgtatcttctctggtcttgaaacaagacttttaaaccctaaactggmaaattaattaatgaatataaaatctktttaatgaattgatgtttgtggaatattatagtggtattgagcaattaatacatgctaattcaatagtctccgtcccttgtaatttctgtttatctcatcacataaaacttttagaaggcygttagttgcatttgctttcttaaaaaaaaatgggaattcactttatgttttctgtgctttttcagttttattttgagcaattaaaagcatttacataatcctgaacataaagtcatatcccctacatacgtacgtacatacatacatctgtgttgttcatgttagttaaaaaattgcaagktcaggaaaaggaatgcatt

SEQ ID NO: 509 - DNA, 401 bp, Glycine max
ccatgtctggcatctttgcattactagattgtctacaacttcaaatgaccaagtttagcaaaggtaagaaaaataaatagcatgccactgaaaataggacaaaacttacatatatagatccttagatattgttcgcgatgccttcttcttccattagaattggagttttatcttgataatccgtgtaatcctttaatgcaraacttattattacgagtagattatgaaagtgaaactctgattctagttgaataacagcataaacaagcamcaagacctaaaaaacttgacaagtaytgtccttaaaaatatcactcatgatcacaattttcacaactatgatattgccataattcataaactgacctgggataagaaattgttggatgttatctcatgca

SEQ ID NO: 510 - DNA, 401 bp, Glycine max
aaataaatagcatgccactgaaaataggacaaaacttacatatatagatccttagatattgttcgcgatgccttcttcttccattagaattggagttttatcttgataatccgtgtaatcctttaatgcaraacttattattacgagtagattatgaaagtgaaactctgattctagttgaataacagcataaacaagcamcaagacctaaaaaacttgacaagtaytgtccttaaaaatatcactcatgatcacaattttcacaactatgatattgccataattcataaactgacctgggataagaaattgttggatgttatctcatgcaatgttaaagaaccatagaagttgttattattggagataaatatatatatccaagattcaatttattatat

SEQ ID NO: 511 - DNA, 401 bp, Glycine max
ggacaaaacttacatatatagatccttagatattgttcgcgatgccttcttcttccattagaattggagttttatcttgataatccgtgtaatcctttaatgcaraacttattattacgagtagattatgaaagtgaaactctgattctagttgaataacagcataaacaagcamcaagacctaaaaaacttgacaagtaytgtccttaaaaatatcactcatgatcacaattttcacaactatgatattgccataattcataaactgacctgggataagaaattgttggatgttatctcatgcaatgttaaagaaccatagaagttgttattattggagataaatatatatatccaagattcaatttattatattatcaattttaataaaattaattttt

SEQ ID NO: 512 - DNA, 401 bp, Glycine max
gtaattaatttatacttatatatttttaataaatcatttttgttgtgtgtatccatagaacattagaaatagaggaaaatttatagtcatgtccactgtttgtcaatataaatttgttctttgtatgtagtttgattttgtagattattatatatggatctttccgtgttgacagtcaaacatatcctattaaggttgatkaattgttttctttttaaagatcacgaaaatatctttggtcgcgacgaatgacgataggctacacaaagatagaaaaagttatttattttcctttccttttatgatcccaaccaacaaaaagaacgaagaatgagggttgcaatgttgtgagtataccccaactaatttcatggtcaatcaattcaaagcaaatgcaaaag

SEQ ID NO: 513 - DNA, 401 bp, Glycine max
cgcatatgtgcctcttctgttcgggacacaattttattgttgtgccatgtttccattttactaactcttctagatagttccaaagtttttccctactatatattctctcttagaaccttcaggttctctcagttctattacttctattattattattattatacgattttactgttcttatatttgaatagcawgtagtcmactacttacatgttttatttgtatttattattataatatttttaattattgactttttracractcacacattataayatttcwtcgccwgtcagacctttttgtaagtagttctttatgaaatctcgacaatctrttttgattgcttttaaaatcaatgasgatctcacaaatcaacgagacttctcatattttgttct

SEQ ID NO: 514 - DNA, 401 bp, Glycine max
gacacctaaattcaagcgtctctcatttttgtcacatcttatcaccaatcatttatctttcttcttttcctagcttatcactaattcagtcgtaagggataccaaatattaatttactttatcaaacagtattacttgctcrtagttaacatgataaaatamtttcggtaatttwtcacgtttaaaactacatagtgcatkgttttaccttctaactaatttaatcaccaagtgtttatgctttcatagaccttctgatttatattagcatgtattcggaattctttttctctgggaaatacctgtgaattgtcatagttgtaagtgttgaatggtcatataaatgcatacaactaactttaattagctctcatgtgatcgatcagaaattgtcaagaaaa

SEQ ID NO: 515 - DNA, 401 bp, Glycine max
caagtagacactccaacaacaaaaacaaatacaatggtttgacttcatagatattttgttcctgatgatgagtctatatatgtacccgccataactccataagggtgcatgtgaggtcacaccgttgtgtcctaacacattgtaacacctaattcaaaagaatgtttaatgaagataatttaaatattaactaagtcattyaaatcaacaaggtactggaaagtcacgagaaggaagaaaatttgcaactgaaaatacaaggtagacattgaagaattaagattatgattaggacgtctcasgggaagcctatgcagagacgtcaacataaacctggtcaaattctgtaataaaaaaaataatgaatcatactaacactccatggaaayggaatttaatga

SEQ ID NO: 516 - DNA, 401 bp, Glycine max
aaaattactaattttatagaaattaaaaatatatttaagtcaaattataaagatacacccacttttattacaatctcaaagcttttttacctaagaatataatgtcaaagaagatgaattcataattaatttgtaaactacagattaagtcgtcaccgtgtacgtgttttggtaaaattagcatgtactttatcacatttktatgtttctatttsttgtattgttttgcagtgttagaggaacgatcgataggtacaagaaagcatgtgctgcctccacaaatccagaatctgtctcwgaagctaatacacaggtatatttagtaagctaaaaaaaaatcaaagaaatgatagaaaatgctcttgtttggttaatttggtccagaataaatgttgttttaa

SEQ ID NO: 517 - DNA, 401 bp, Glycine max
ggacaccaatatggtaatatgctgtgttttwtatatatatataaatccataagttcatgattttgatagatgattccccatggcaacattaactaaccattttgatatgtttctcgcttccttaaattctcgcctttggatgcagctgataaacgatttgaaattatgccgcagcctttcaagtggtgtgggatcccttamatcgtcctatgtttcgtgaaggagagtgcccttagaaactcctctgctaaagttcttacaacggagaacaagagaaaaactaatcagcatttgtaccaatacatcatttgatattgtttatgtatctttcaatatatatagtttctattcagtcctggcatattgtatttttatgttataaatgcttatttcaatatgaa

SEQ ID NO: 518 - DNA, 401 bp, Glycine max
caatccataataaattgctcggataaatttccttataaacacttatagaaatgaaaataagtaaacttaaatgaacttcacccataggtgaaaattagtaagttctttttttttttatcttctttaaaaaattaatttaaacttatatgtaacctttgtcaaaacattatatataagttaattttaatttgtgtgtaatgyttatttcatttttacttattattttttctcttataattaccagaaaatttatctaaataggtacgtgtattaggaataagctcttcggctgcatgatttcaacataaattaagaatatacccgytcacttgagagaaaaaagtcacatagtagagctgtccattccctccagcatacatacagaaattgcattaagtagt

SEQ ID NO: 519 - DNA, 401 bp, Glycine max
taaaaaattaatttaaacttatatgtaacctttgtcaaaacattatatataagttaattttaatttgtgtgtaatgyttatttcatttttacttattattttttctcttataattaccagaaaatttatctaaataggtacgtgtattaggaataagctcttcggctgcatgatttcaacataaattaagaatatacccgytcacttgagagaaaaaagtcacatagtagagctgtccattccctccagcatacatacagaaattgcattaagtagtaatccctttgtcctaaatctttaagcagttttgcttccaaaatcctcggtttcttgcagtatatatagtgaccaaactcggcaacatttgttaccagggtctgttccttgttgtccagcaggtt

SEQ ID NO: 520 - DNA, 401 bp, Glycine max
ttattactagatacatattacaaatataaaataaattaaatattgatcagtgtsttctatgggcactagtgttcatgaaaatacgytggaatttatattgctattatttttatttaaatttcaattatgtaaaaaaaaaatatagtactagtgttcatgaaaataatgggatgcatttatatagatgcacttaaagtaaakgaaggattaattctcgttcatattaattattcaataggtataattaaatttaaagagataaatataattagggttgatttgagagtaaaataactaaaatttaaattttagattgataaaaaaaaatatacttttaatttttataaagaaaaagtcacgcatattatatatataaaggttccaacattatagctctcata

SEQ ID NO: 521 - DNA, 401 bp, Glycine max
aatacggaaaatcaccgcctcatcattaattattcttgaattgtatcacaccgagcccactatgataacgttatttatttatgggctcgttgattcaggataatatggacgtgaaatatggcactcacactaccttgagtcattatacaatgaaatggacaaggatgttgtggctgtacatatattcagtttttttttttwaaaaaaataatgaaaattgattctcgtggaaacaaaatagcctcacatcattaggatgatgagtggatagaattatggatttgaacaataaataattaataagttaaaattaatttkaacttttaagtctgtcctttttcgtttttgtgagagagagatattattttcattcaatgtatagtattatatctttatgtcat

SEQ ID NO: 522 - DNA, 401 bp, Glycine max
agtcttaaatccggttaacacctcaaaaaatccaaataaactttactacacgtgaccaaaggaattatgactatttattgagtatgcctgtaagaattattatattgcatcctattttgacattagagaaagattttgttgggagaaacaaaatttatttmggtgatctmtacgtctcaaggattaattccatgacttcgkactgtgggaatacaacccttcaaacatcaaatttagaagacacgtagctttttttgctggatgagatccacggtcaaaatcaaataataatatccagatgtaaatggatcggaaatgtagcaactgatattactagttgtgctagcagtagatgtagatgtgggtctggggaggaagacttagctacacgagttttctga

SEQ ID NO: 523 - DNA, 401 bp, Glycine max
ggcaaagttgaagtgacacaagatgtttctraatcagtttgtgagacttttgagcctgatgctatgaaagatggtcaagttgagaatacaatggaatcagatgtagtagagttggaattgaaggaagaggaagggaaagattttctatctgatctagctgtggttaatgatgaggtgaaggaaacggatttgccttcttcrgagagcaataatgagctcctttctgtttcaggaaatgagggacaaagagaaactgaagttgtggttgaaacattttttaagcacatgatgtttggtggagaggagaagaatgttttgtcttcagttgtgacagataagttgcttagagagagtgaggaagcaaatgaagtctatggtgattcttctttgcctctaactga

SEQ ID NO: 524 - DNA, 401 bp, Glycine max
aactattaataaatttaacattactaattaaattaactaacttatctaattattgtgaattaattaaagaatcttatattaggtacaaaagtagtagttaattacttaaattgctttaaaagttgaaaacgggtaattgttagctagtggtataaagaattaaaaggtgggaaacaaaacaaaaggcataaacactacaaraattccggctattacctaaaacccactgtaaatcaaaattaaattaccawcaacttacggaaggctacttatccctctactataatcttgttgatatatatatatatatatatatatatatatatatatatataaatcracratcatgaaaaaamctcagcaatatagtggactaaggccaagctcattrtaattygagg

SEQ ID NO: 525 - DNA, 401 bp, Glycine max
cccgtgatgaggggaaacaaaaagatcttaacctgtcttatttcattcacatatttatacaaataaatgaaagataataacggaaataaattaaagtccatttttataaatatttacaatatcttcttaagatcacacttttggcaaagaaaaataatcttctatcaaagggaaaaaaattcattaaaggaatattactgytaatttcatatatttattgaaacgaatcaaactaaatcaaacaacaaaataatcatttagaaaataatagcattcatagtaagtaataaatatatgcatcttaaaatctatgcaacaaacatttttttttttctgaggaagttcaacccwgctcataatttagaacgaaaattaaattacacmtagtactccaaatagaa

SEQ ID NO: 526 - DNA, 401 bp, Glycine max
tcctctcatgttcgcttgaaaagcttagatatgtgctgaatagctattcatacawgcaaataaatttaaataccagtacagaatgaaaagtagagcatagacatgaagacagctttaataaaatcaatggtaagaaaaggcataaggattcagcttttaattttatatcctatgcagattttattacaaagtataacagcrgaccatcctcagcttcacaaagttttacccttacatttacttgagtcatgacagragtcattaaaattaaaaatcaattcttcaatgactataaaacagctttttctcattttgatatattcaatactttcatatttacatggcaaaatttaaggctctagtttttgaagaaggaacacctcacagtaaagatatgaaaa

SEQ ID NO: 527 - DNA, 401 bp, Glycine max
agaaaaaaaagctgaatactatagaaggatgcgagatgatttgaagaaggctgacaacgaagacaagcttatagagcgtcagcggcttagagaaaaaagaatcaagcagaagatgaaatggaaggctgggaatgcggaagaggrcgaccaagatgatatatctgggtcagaagtagatgaractgttgatagatggcataraaagagtaaagtatactttgatagtgacagtgacgakggtgaaagaaatgaygttacagggaatgcaggyataactaccggtgcggttacgttggaggagcaagaagctctggctttgaaattgttaaattccatgcactcatagratatgcgtaattcagctgtracattttgtgacagcaaaaacgggtggaaagaga

SEQ ID NO: 528 - DNA, 401 bp, Glycine max
atgacctacaaataaggatatagcaccatcttaaaccgctgtgatttgatcattattttgggtaaacaaggtaacaacataacaactgattatattcttatgtttatcggtgtaaacatcataaataattaaggaaatcacattgaaaactaacttctgatttaaatactgtgaccaaattgtacaagtctcaactgtcayaagtggttgacatatttacagtggttcaaaacacaatttttgtatctacattaatatacacgtacataatttaatacaaacaaaaagctaaactgttcttctgagaatacaaaatatacccaaaatatttasaaacccaaataaagtgttgtttgactaaattcaaagcatgcttatttcaaagaacattttctaaatca

SEQ ID NO: 529 - DNA, 401 bp, Glycine max
agttgaccttgaacctttattgtctttaagctttaagctgacatttttatgatttctcgaagcctcacataacagcccaagagcctgcagcacaagaaatacaaatatcaaatcacagttctcactgtcttgctttcacaccacaaaaaaaatgtggatttctattctgtgctcatggtgtgcaaacattggaagattttyatgtttttcgatatatcaatactttcttttctattaaaaacttggggcgtttacttgcacttctattgtctrttttytttagttgcaaaaatgtcaccttgctttctatttgtttcctattgtcaaatacatgaaatggagggggggggggrrgrrgggggtttagcgtttcctgtacaattaaataaaaacaggaaaca

SEQ ID NO: 530 - DNA, 401 bp, Glycine max
taaatcttatatgtaaagaaaataaaacaatgttaaagtctatatgtgactgtacatgtgtcaaattttatattaacaccaaatcctacctttcattatcctttaatctaaatcctaatattgattcactaaatcaattaggtgaccaattctcttcttcacaaacgcagctttcacggtggacctagaaggatcacttcrggatgcttatgagattctggtttataatgtcatattgtcatttaattatgtaggcttctttgattggagagagtctctactagaaacttgtctttatatatggtacataaagtaactttgcctgcctgcttgaactttcttaggaagagagtatatttacaattagtatttttgcaatgactccattcatggctatatct

SEQ ID NO: 531 - DNA, 401 bp, Glycine max
tgctgatccatcaacgccaaaacatcacccagaaaatggatccacgttgcattgttacctgttcttaccaatttagaaacttataaagttccaaggtaaaattaattaggcattgagagctacatcaaattattctgacaataaagtaccatttttcttgccagaacgctcaacatgacaccacaatgtacgcaatgaatygatacagttcatggcagcaacccttatagtctggaagaaaattcaaaaaatgcaaasaaatcatttgagccgatgacattttctcaaaaagaaaacagcaaaaaaagtaacagaggataaccatttgtcaacaattataaattgcmagtttgmagaaaatgagaaaaaatacacacaaggtcagagagtaacgctaacaa

SEQ ID NO: 532 - DNA, 401 bp, Glycine max
cctgttcttaccaatttagaaacttataaagttccaaggtaaaattaattaggcattgagagctacatcaaattattctgacaataaagtaccatttttcttgccagaacgctcaacatgacaccacaatgtacgcaatgaatygatacagttcatggcagcaacccttatagtctggaagaaaattcaaaaaatgcaaasaaatcatttgagccgatgacattttctcaaaaagaaaacagcaaaaaaagtaacagaggataaccatttgtcaacaattataaattgcmagtttgmagaaaatgagaaaaaatacacacaaggtcagagagtaacgctaacaaaggatcatacctgattatcacccgccaatggaacaagaacagaaggaaattcagcta

SEQ ID NO: 533 - DNA, 401 bp, Glycine max
aaagcacaaatatgstagtaaatcctttgtacctcatccaatgagacatcaccagctgtcactgatgtttcccactcagcctttagaataggaaatacacattcaaatagagcacaaatgtcttcatctttgatcaaaaggaaaaaatcaatatttagcattccttaatcccctcttttgaaattttttggcraagaaatytaatagagaagagaaaagtacaactaggggatgtataagatatgcttcaaacatttatttctagcttatttgttcaaacattacttttttttagtcattatacaatataagattattaactatttctgaaaaatattaaaatggaattcaaaaagagaaggggaaaacaaaccttttggttttatcaaaagagactgcaa

SEQ ID NO: 534 - DNA, 401 bp, Glycine max
gtaataatcagtaaaatatcattcaaagcttctattctcttctttacctccctctatacctaaaaccccataatttcaacagatcaaataagcactaaagtaaggtcacccagacatataatcatattttatgattgtgctgacatatatttccctcaacttaagtgctatagaaacagatggttatggtctttgtttggwgctcagtgcgggtttattttaagggagtctccaacacaatyacaaatatggagagaaattggagggctcttttatattggtgaattacttttatttctgattttaatgaaaaaataagggatattgaaaactatttagcactcaatctgtatcacagcctaaccatgaaaaaacgaaaattcatgactggaaagattaaa

SEQ ID NO: 535 - DNA, 401 bp, Glycine max
acataaattacatcragtaaaatctaaaawattgarcatcatataaacagaaaaaaaawttataaatctaaatcttaagattttarattaaaatataatktcaratttattagtataaattttcttgatatttaacttatataataatttatcttaaaaatatataattaattaatcgtacaacaaactcattaaagggaraaaataataaaatttcaatttaagaataagagaaatgaaagacattaaattttgaaagaaaaaaaaatcttaaaatmatttttctggtgctttccttttttwaaatacattattgtttatatttttttcttttttattttttctctcttcctctttaaccaagcatacaattagmaaataactaaattcatatttttcta

SEQ ID NO: 536 - DNA, 401 bp, Glycine max
gagttaaatatgatggctggaaatacgaatatatgaataaaatttgagtcaatggrcccaatacaatatattaaaaggacaagactctacctttgtycagcataggtgaacatggatatatttaggcacacacccacatgattaagtctgaaactctcaacagtgaggagattgtttgtaatgttattgatagtaatttaytggaatggattttgatgaattttataggatcttttaatataaaatatgaattttgatgaatattttttgtttgtaatcataattatgawtttttatagctcataaaaaagtcttatatagtatwtaaaagtgtamagatttttgatgaatttttttagatagatttggacgaattttataggawttttttagtataaaac

SEQ ID NO: 537 - DNA, 401 bp, Glycine max
taccctcaacaggtcaaccaacctctttttcattcctcatgttcatattcataaataaatagtactatatcatcaccctctttgkgttatttatttcctacttgatcaacttacagtacctgatttctttcgtatttgattggattatgttgttcagttgggaggattccttttttttwtatagggttatattttcaaaaytattctctatttcaagttatcgagtttaatttcyrtggaggataaaaaaaaatcatattgttaatcaatcagaaatcatctttgatataatttttaagacagtgactatggtagcwtatytccgggrttcaagatatagccctgcaaggtttctttggttatgaaattcaaagttgatccaataattttctgtcactctt

SEQ ID NO: 538 - DNA, 401 bp, Glycine max
caagttatcgagtttaatttcyrtggaggataaaaaaaaatcatattgttaatcaatcagaaatcatctttgatataatttttaagacagtgactatggtagcwtatytccgggrttcaagatatagccctgcaaggtttctttggttatgaaattcaaagttgatccaataattttctgtcactcttgtattggtgttcrtgaactgggttctagtcacaaatcttyaaaagacattttttattcgttatggttggtgatttmttatagtatatatctgtacacagacaatgattattatttatcagcttatataatatgtaactcgaacagtttgtttcgctttctatgaattatttgccaattctaggacaaatattctgtgaactgtcaaccgtgct

SEQ ID NO: 539 - DNA, 401 bp, Glycine max
ggaggattaacataataacacactaatattcacaagattagaatacaattctaactcaattrattgartagaatatatgaattgttattgtaaatcttgagtattttgattcttataaataaaaatatatttgaaatattttattttagtraacaagagtacaataaaatattcatttaatcaaagtgaaaaaakaattcyttatattttgtataggttaagaatacaaatatgtagatggtggaaaattataatttaaaatgtaatatactacatataatattccacctaaacaccattaaagagatcggtatattaatgaacatttaagtaaaaacccaaaattaaaagaaaaattgatgtctcatcatatatcatttaagtgagtttattgtcattca

SEQ ID NO: 540 - DNA, 401 bp, Glycine max
agctcttgatgttttagcaaagaggcatatacaagtgggaagacaacaccgttcaaaagagacttttttcgagcatggggaatgtagttaacaaaacgaacctgaaaacagtagaggattacacaaaaggacaatgaatgaaaaagcagctgctaatgaagtttgagaatcattctataaaatttcttaatgatgccactwggtatccttatgaaaatcgatcaaaacggttacatatttttgcatgttcaagatttcttgagtagtagtattagataatagatattgataatagaatgacaagattgttaccagattcataattgcctactcttcgagattctctaatcaatactgttacaaggtttcctctttgtttcagctttcgtaatggaaaatac

SEQ ID NO: 541 - DNA, 401 bp, Glycine max
aaattattaaatgrgctttatargttttcctacattcatatatttgatttatgtttatgttaaaatttcttaacattgagacaatgaagaatattttgaaaatataacaatttattttaacttgtcttttaatgaaataatttattgaaaaatakaatcaattctttcaattaaattttattaaaaatatgcaaaaataarcattacataaacaaaacaacattgaaaataaatattatagattacacaacaatttaggactaggttaaataattcaatatttttctcaaattatgttatatartatcytataatctttatattatttctcctttttatattttaaataagttaaatttgattctgtaraaaaagataaatttgaaaataaatttatgatt

SEQ ID NO: 542 - DNA, 401 bp, Glycine max
ttttttaagttcagttgttaaaattgttaaaacttggaaataagtattatgtattttttatattttaarttgaataattattattcaacttaaaaataattattgttttactttaagtttaattattgaaatttttattgttsgtttatattattaaattaattattattcaagttttattcaattaataataaatttttwaaatwtttttaaatatttattagtataattttaaaactttaaaaataaaaacaaaccaaactataaaacagttaaatttattatgtaattcagactactaattctaagtcaagagcacaccaaacccctcgggaagactcctatttatgcctccgccgaccgagagggtatcctagccttccgatcataagattacgtgg

SEQ ID NO: 543 - DNA, 401 bp, Glycine max
taagttcagttgttaaaattgttaaaacttggaaataagtattatgtattttttatattttaarttgaataattattattcaacttaaaaataattattgttttactttaagtttaattattgaaatttttattgttsgtttatattattaaattaattattattcaagttttattcaattaataataaatttttwaaatwtttttaaatatttattagtataattttaaaactttaaaaataaaaacaaaccaaactataaaacagttaaatttattatgtaattcagactactaattctaagtcaagagcacaccaaacccctcgggaagactcctatttatgcctccgccgaccgagagggtatcctagccttccgatcataagattacgtggcaatt

SEQ ID NO: 544 - DNA, 401 bp, Glycine max
gaattaatatttgrattcttattggaagaggtgccactatgaaattgtacattgaacaaattgtcwccaaaagaggatatatgtgaaaaacaaaacaaaaagtaattattaagttgttattacagtaataaaatccttttagtgatttagttgtaaagtaaactaaaataatgagtattattrtagaaatcaattttcttraaataaagaggagcaactcakagattctaacacattttttttattggtcaaaatttatcgagaattacaaaattttgagtgcacatattaaacaaagggtaagacccaagcaattttataatttctaataaattttaattaataataaaaamatkttagaaaaaaaatataaaaaaagagatagcattaagaaaaagaat

SEQ ID NO: 545 - DNA, 401 bp, Glycine max
tttgtaggctacaarcaacttcaaagttttaaaacctaagtgtttccttcatctttgtccctttttgatacttaatgtgtccctttttgatacttaaagtgttttcttttatagcttttgttttacaatgtctaataaactaatctgtacgtgctatccttttttttttcttgaatatttgtttgtaattcattttgttcrtcaattttcctacccccatcagaactgcagtggcagtctgaactctgtactccggagatgtgataataaggtgtattttgcacgccaagcttctgcttctcttggttattttatgaggcagacttcaattgaagaggtacttaaatgttcttattattgaaatagttaacgatgttcgatgtacttttttttggtaagtg

SEQ ID NO: 546 - DNA, 401 bp, Glycine max
aaagttcaaactggaagtagtaataaaatacctaagtacctaacatacattaggaagattttggstwcaagctatcacactgctaagccaacaataccaggctagtgaatagtgatctcttttacyaacacaaaatggtgagtcaaattgtaaccttgaagttcaattgagttcactgagaaatttattggatatttaatkttctgttaggctaaaatagctgattcactattgctgcaactagctactgtaatgatggtcatcacttttatactgttttggtacttagatcattatgktattttaawtacacaaaaaaaattgaatctatgccaatcctaatgctttgtttggcagctagaatactgccatgatgattcataaatttatcacatctactc

SEQ ID NO: 547 - DNA, 401 bp, Glycine max
taatttcwgggactagtatgtgatgtgtgtggtttcgcacaagttcaaagatatgtgctgtacctttatacatttgaagctgataatctgttgtttctttctccattttcagggatggatttctacaaattatagttcctaaartttgagtatgactgagcaatattgatttgtagcacatatatgtatacgtatacctayaccccgtgcatatagatggagaagaaatgggcattgttctgcatgggccatgtcatgccctacatatatttgtaatgtaatgagcagatgatgggttaattttgatttcatatacaacttaattgttgtgcagaaaatgtcctgatkcattttgaaatctaatttattaagtcaattgaccaaattcccccccgtattac

SEQ ID NO: 548 - DNA, 401 bp, Glycine max
aaagaaaattataaaaataatcatccaacttagtgattgttagagcttrgagttggaggaccaagcagyctcctaagagagaagaagagagcrcgagagaraaytaagggaagaacttttctgatatattaattttagcatagcrttgcagaagcgcttcttacactatataagggctactaagggacaagttcccracarcaataacaagaaaatacacaaatccargraatatcctaacagaatgatattcccttattcmctgctacaaaggcactaccagaargatacgaatcctactacgctcttcatgtacgtgcgatgcatgcagcatgtgtcatagctagccaygtaatycctgttgttgcctcctttttkggtctcacgctttttgcttcwtr

SEQ ID NO: 549 - DNA, 401 bp, Glycine max
ataaaaggttaatccagtgaagttgcttttgatggaaaaatagtttcaatttgcattcatgtcttaagtcgtgagagaatttaaactgaattacgtttttgtaawtgwtttaaatatattaaataaatcaatttgactaattcattccaagttcaattacaaaggagacgttacattgatgaatttattaaatttaaacgratttcatattcatttgagtcaaaatgagctaatgatgtgtccgatattctttaattgccgatacactaacgcttattattttattaatgcaacacgaaataaacacaaaattttatcaaaatccaacaaaaaagttagtaggcaaagtattgcagtcgatcctcctgtttgattctttgtcttgtagatcatacttctcc

SEQ ID NO: 550 - DNA, 401 bp, Glycine max
ataaacacaaaattttatcaaaatccaacaaaaaagttagtaggcaaagtattgcagtcgatcctcctgtttgattctttgtcttgtagatcatacttctccaggtattgtatcggccaaacttttttgtattttaaacttaataatgtattgccgaggtggaattgatgctaataagtaatagaaagtaatatccwacascatctttgtgtgaaaagtgaaaataaggaggggggtgaagttgttaagttttagaatgtttccacatataaaatcggaagagtctaggataattcatcttacgagtgcatgattttatgtttcaatttttattttcttcctgattttaattattatctgttaaaaacattcattcaacacagtatcagttactatatagt

SEQ ID NO: 551 - DNA, 401 bp, Glycine max
ctatatagtgtatgccaaagtgtggaaggaaaaaggttgatcgaactggttttattttattataagattgggtttccgcccctttattttatacataatgactattacgtttgctttgtttgaagatgagtattacccaataaaggttgcttatgaaagcattatggtttttgagatcgtcaagcttttccattatttttrtcccaattaagcatgagtttgtgggtacgtagttaatagttatgctaaaggaacttagaggaaacaattaataaccgttgcagtagaattctcgttaaagggtttaaaggatttagcgaaaaactgaggtaatttaaccaaataatttttgtttcttaactaaatcagaaaataactatatcaaactagatcgaatgctc

SEQ ID NO: 552 - DNA, 401 bp, Glycine max
tcataggtacgattaatcagtcatacgtttgattctaattatgtaatctgaaaaaaaaatattattattattttaaataaattcgattaactattacacatgcacaccttataaactgcattcatatattttgaaatcaagggcttaaacgcgccactaaaacttgaagataaccgtgttacgaaattatcattttctgtwattaacttcaacgtttattttttagtagtatcttttcttttctttgtccataaaagcttatattatttaaattttcttaattaattttaaacacaatagttagttttttttactgcaatacaatagttagttaattacatcaacctaacatgtgtttatattatagtaaaaaataaattacaattcttaattgttccttt

SEQ ID NO: 553 - DNA, 401 bp, Glycine max
ggattaaaatcagtgggttacttttgattctcaagcatttgaggaataacacaactattgtatttgattgtgttgcaagtcttacgatgggtaaaataaaaataaaaaatcaaagtgaataagttagaaatgtttgagtttattaagtttagacttttaggacaacatgatacctaaacttaaacattaaagagcccaacyacattctattattaggcccgcaatccataataaattgctcggataaatttccttataaacacttatagaaatgaaaataagtaaacttaaatgaacttcacccataggtgaaaattagtaagttctttttttttttatcttctttaaaaaattaatttaaacttatatgtaacctttgtcaaaacattatatataagtta

SEQ ID NO: 554 - DNA, 401 bp, Glycine max
catgttgttcaacaaatataaataaactgttagggacaaagtcccacatgatgagctttkcttttagcttgcactccaaagctataaaagaaggcttggtggaccctttattaacattccaaaatcatttctcttctcttcctttatttatttagtctagttagagaaaaaaaatacgagaaaaaatagtttctccgttcytttagtagtagtattttyctctttgttaattagagtgtcaatgtgcttttttcttgtgtttagagagagaaatgttgtactttctttcacttaattagtaaaaytcttttcactcattatgatctcatatgctcttttctcatctcttattttaattaagttattattttgttacttgttacccatcataaccaaaaaat

SEQ ID NO: 555 - DNA, 401 bp, Glycine max
taaataaactgttagggacaaagtcccacatgatgagctttkcttttagcttgcactccaaagctataaaagaaggcttggtggaccctttattaacattccaaaatcatttctcttctcttcctttatttatttagtctagttagagaaaaaaaatacgagaaaaaatagtttctccgttcytttagtagtagtattttyctctttgttaattagagtgtcaatgtgcttttttcttgtgtttagagagagaaatgttgtactttctttcacttaattagtaaaaytcttttcactcattatgatctcatatgctcttttctcatctcttattttaattaagttattattttgttacttgttacccatcataaccaaaaaatagaatggataaaatttgt

SEQ ID NO: 556 - DNA, 401 bp, Glycine max
cctttattaacattccaaaatcatttctcttctcttcctttatttatttagtctagttagagaaaaaaaatacgagaaaaaatagtttctccgttcytttagtagtagtattttyctctttgttaattagagtgtcaatgtgcttttttcttgtgtttagagagagaaatgttgtactttctttcacttaattagtaaaaytcttttcactcattatgatctcatatgctcttttctcatctcttattttaattaagttattattttgttacttgttacccatcataaccaaaaaatagaatggataaaatttgttttaaaagtttggtgttgaagtgctttctaggaagtcttacttcaaaaacataattataaagatttacatatcaaattctgttaag

SEQ ID NO: 557 - DNA, 401 bp, Glycine max
ctttttaataaaaaaaagtagtaattaagtatatcgtgcaatgagcagctatatttgtaaaaatttaaaagttaaattaaaaatattatataaaattaactcaattgataaataattttttaatgataatgaatataaatatacaaatatttagaacctttaaacttttaaaatctcaaactattctaatcaacaaaaaartcatttatgatttaccaattaaaattctattataattttttacattgatcaaagaaakttttcttcaattaacgaraagcgtgaattaattacaggtgactattatcagaattcggttggatgcaagtaattctaagttgatgaggaaaatatcawaaatctcaaaaagagttaaaaaaaaggaaatccataaaagtaat

SEQ ID NO: 558 - DNA, 401 bp, Glycine max
aaaaatttaaaagttaaattaaaaatattatataaaattaactcaattgataaataattttttaatgataatgaatataaatatacaaatatttagaacctttaaacttttaaaatctcaaactattctaatcaacaaaaaartcatttatgatttaccaattaaaattctattataattttttacattgatcaaagaaakttttcttcaattaacgaraagcgtgaattaattacaggtgactattatcagaattcggttggatgcaagtaattctaagttgatgaggaaaatatcawaaatctcaaaaagagttaaaaaaaaggaaatccataaaagtaatkaacttattatagagcgaggaaactaagttagagagagctgcatgtgctctgatacaa

SEQ ID NO: 559 - DNA, 401 bp, Glycine max
ttaaaaatattatataaaattaactcaattgataaataattttttaatgataatgaatataaatatacaaatatttagaacctttaaacttttaaaatctcaaactattctaatcaacaaaaaartcatttatgatttaccaattaaaattctattataattttttacattgatcaaagaaakttttcttcaattaacgaraagcgtgaattaattacaggtgactattatcagaattcggttggatgcaagtaattctaagttgatgaggaaaatatcawaaatctcaaaaagagttaaaaaaaaggaaatccataaaagtaatkaacttattatagagcgaggaaactaagttagagagagctgcatgtgctctgatacaacaaaaagcaagcactcat

SEQ ID NO: 560 - DNA, 401 bp, Glycine max
ttgaaataaataaatattcatgamacataaaccttgcttttcatttgtatggtgattttttttgtcttaacttaacactttgattcattaagraaaagaaatcctgactaatttaaaatttgattraaaaataartttgataaaaraattatttccatcaatgatcgarttcaagtactacccaaaygatttaaccwtaaytttagcatattaatcacaaatattcaatcacttcattargtgatatargatattttcatatagctgtattttagaaaattattcatctcsaattcatttttatataggtagcaattctagtatccawtattcttatactttatgtataggtagacactcattttcaaattcattatccacattttaattaaataagagtg

SEQ ID NO: 561 - DNA, 401 bp, Glycine max
tacacaggacttccacacctattccattgattggaacactcagcgcataatgtaagtaacaaaataaattaatgtataaaattaagaatttaatttatatgcactcgtcgttgtaaagcttttttatacatagacatccagttcattaatatggcctagtcatagactaaatttcaaggtgcaaaaaattattaggcatamctgtttatggtgacaatctttgtatgtaacatgtatttaagttatttaatttataatacttaatatacatatatcatgtaaaaattaattgaataatttttctgaagattaatgttgtatatgtaaaaaaaaattattctatcagwgggtcaataagaaattattgttaatattatttgataattattataaaagttaat

SEQ ID NO: 562 - DNA, 401 bp, Glycine max
tctctatctcacggtagaagaaggaggaggtggcaaaaaaaaaatcatgggcgatgttggagacagcaaatagcggttgctggggtgggggatttggtttgggatgacttacgatactaagattaatctaatggtcaagattgatggttcaaactagaccccacctatgaaggtggccccctgtagtaatggcctacgatraatgtctaaaaccatgaaggggatataacaataacgcttgcaaggggataacaagtttcactataaaatataataagaaatttacaagtttacagccaaaaaaagagagtatgtacaaatttcagaagacaacaacagcatacaagattacaagtcatgttgaaggctctcggaaagattgaatcaacgccatctaattt

SEQ ID NO: 563 - DNA, 401 bp, Glycine max
tatgtggtttgttttttcattgtacaagtggcatcattgcctctctttctcaaccttgaaaagtttatgtttttttattgttctgcttcagtgaaaggatttagcaaaagtcttgataatttacttttttttttttattcagcatgcataatttttcgtggtggtttcaawtgaggctattgtatgacatcttttatttgrtgaattgycaactcctttttatccaattaaagaaaaaacaaaaaaagtgkgctgcaatttctttattctattgcttcttctacttcctgattttacagattagtttacctgcgagtggcggggatggatgatggattgaatgtgaaggagaggatttactatgtgagtctgaaactacgcactattgtccttgtatctta

SEQ ID NO: 564 - DNA, 401 bp, Glycine max
ccacccctcagacaacaamaamaamaacaacaacaacgccttatcccactagrtggrgaaccccacccctcagaaaaagaaaaaaataaataaacacccttcttaaagggatgaaaaccccaaaggtccacattgaataataccaaaagattaagttctttgcaagtaaccactaaagaaatcgcacacacaacacatgayatttgatcaagagcaaggaactcacatctatgcacattaatgcctctttagttgcacrttgtacatcaygattatcattatgccacaaaaacacragctcacaaaataaatgctcctgacaggcataagaaaaaactattagtttaggtcacagtagaagctacattggtgataattttttcatttacacaatgaaacag

SEQ ID NO: 565 - DNA, 401 bp, Glycine max
aaccccacccctcagaaaaagaaaaaaataaataaacacccttcttaaagggatgaaaaccccaaaggtccacattgaataataccaaaagattaagttctttgcaagtaaccactaaagaaatcgcacacacaacacatgayatttgatcaagagcaaggaactcacatctatgcacattaatgcctctttagttgcacrttgtacatcaygattatcattatgccacaaaaacacragctcacaaaataaatgctcctgacaggcataagaaaaaactattagtttaggtcacagtagaagctacattggtgataattttttcatttacacaatgaaacagattatcataaactcattaactacatcattagctctactcatcaattatcatgaatgac

SEQ ID NO: 566 - DNA, 401 bp, Glycine max
tcagaaaaagaaaaaaataaataaacacccttcttaaagggatgaaaaccccaaaggtccacattgaataataccaaaagattaagttctttgcaagtaaccactaaagaaatcgcacacacaacacatgayatttgatcaagagcaaggaactcacatctatgcacattaatgcctctttagttgcacrttgtacatcaygattatcattatgccacaaaaacacragctcacaaaataaatgctcctgacaggcataagaaaaaactattagtttaggtcacagtagaagctacattggtgataattttttcatttacacaatgaaacagattatcataaactcattaactacatcattagctctactcatcaattatcatgaatgacaactacaaact

SEQ ID NO: 567 - DNA, 401 bp, Glycine max
magaaaatgagaaaaaatacacacaaggtcagagagtaacgctaacaaaggatcatacctgattatcacccgccaatggaacaagaacagaaggaaattcagctaaaagttcaatttgccatttatcttgtgacaggctacaaagaaatgcatagcattgaagactttcaacctggactgcagcaggaacacctgcagaaygaaagattcaaccaaaaaatatcaaatatgccaattgaattttatctgacttctgattcataaaatgttaaaaatatcaattcaaacaaccacgatttcgatcaactccctctccctctcccctccccccccccccccccccgaaaaaaaaaaatakaacttaattgcatttgcatagatggacgaaacaaactggaggt

SEQ ID NO: 568 - DNA, 401 bp, Glycine max
atatttggaggattaacataataacacactaatattcacaagattagaatacaattctaactcaattrattgartagaatatatgaattgttattgtaaatcttgagtattttgattcttataaataaaaatatatttgaaatattttattttagtraacaagagtacaataaaatattcatttaatcaaagtgaaaaaakaattcyttatattttgtataggttaagaatacaaatatgtagatggtggaaaattataatttaaaatgtaatatactacatataatattccacctaaacaccattaaagagatcggtatattaatgaacatttaagtaaaaacccaaaattaaaagaaaaattgatgtctcatcatatatcatttaagtgagtttattgt

SEQ ID NO: 569 - DNA, 401 bp, Glycine max
tgtgataaacttttattatatacttcaattatgaagaaaaaaaacacaaagtgtgttgaaatgtttattttgttttatgttaccattagaagaataataagttaccctatcgaatattcttttaataaataattgttttgtaaaatcttctgataaattaaaaattactatcacgtaatttatatttataaatttttattratctaaaattatgaatatgtgaataacattgtagtactacaatagagtggakcgtgtactttaggaggaaggcaggtaagtaataagttggatctgtcgccttggccggtttgtgccacgtgattcttgttctgctyaactgtggactcatcagccccaatttctgactttttgcccttttctcttgggatctcaaagtt

SEQ ID NO: 570 - DNA, 401 bp, Glycine max
cgtacaaaattatacatatagaacattgaggatgactctatgtaggagawgattaaactaatcacatggttgaagtygacttccaagtatcaatcatatttgataatttcaaacarggrtctctatattctcatgcttctatattttggtggtctcctataagtgcaaacatgtcttcgtctctcaaagrggtatraattygaaactcacaaatttagtatttattatttatataaaagaaaaaagaaagtgttagaaaatatctaattaagwgaatgatgaattttaatttatratataaataagaataaattcttcyataatttgatgtgggtgtcactgccatagccaatgamaatgcctaaggagaccttcagcgttcaaagtgggagagagcaatc

SEQ ID NO: 571 - DNA, 401 bp, Glycine max
tgctcaatattactaccttgtcacaaatgaggaaagatggtcacccatctgtttatggatatggtggacatagggatatggattgcagccactggtgtctccctggtgttcctgacacttggaatttgcttttatatgcagctctcattcaaaattaaggtatatggctggtaattcttaattataaatgatgatcatgastttttaatataagcaaytcattcaaattaaattcatatattcattgtcattgttagtagtattacaggcaaaacgctttcatagaattatatagtatttcttaaagcaataaaacaaattcaacttaaatttgtatagctccatcagtttaagatgtctctcatcagaattgctaatttgagtgttataatatacgtagc

SEQ ID NO: 572 - DNA, 401 bp, Glycine max
ttagtgtcagtrctttatctgacttgataagactgcagttgaaaccataatccattatgaatttaaaaattgtagtaaaagggaaagattaccatttatgtctacctctacaagacctccactagagttctgttatcaataaaattcatcattctttccttttatctgatccagttctatcagttttgttcttcatttatkcaaaagctaaaagtaaatawttttcccttgcacagattttaaacctccatcaggggaaggcaaaagaacttatctcatactggccatcatcatagtagctggtgttttagtggttgttcttctggtgctggttmtcttgaggaggatgggatggttaggaggcaaagatccagtgtataaaggtatggaatatgccccca

SEQ ID NO: 573 - DNA, 401 bp, Glycine max
ccttacgtagtattttttagtcgtggtccctcacctaatcaatcatcaattggctactagtgttttaggaattttgacttgtgcttcacaaatcacagctgttaactatgatcacaatattgctgttgtggtgtggtccatacattatgtagtagttggcatgactatgaattactggagtagacgatgtatggcaattgraacacacaacaaattcgggtaaagcatttttttctgacttacttttactaggcattcttaacatattatcctatttttctttgtcaactttgttttctccattggggcatatgagacgcatatgtgcctcttctgttcgggacacaattttattgttgtgccatgtttccattttactaactcttctagatagttccaaa

SEQ ID NO: 574 - DNA, 401 bp, Glycine max
agggtgcatgtgaggtcacaccgttgtgtcctaacacattgtaacacctaattcaaaagaatgtttaatgaagataatttaaatattaactaagtcattyaaatcaacaaggtactggaaagtcacgagaaggaagaaaatttgcaactgaaaatacaaggtagacattgaagaattaagattatgattaggacgtctcasgggaagcctatgcagagacgtcaacataaacctggtcaaattctgtaataaaaaaaataatgaatcatactaacactccatggaaayggaatttaatgatattacactaagtatttttctttttttttatcatgacttaattcatataatatcgtaaattaagaaacattgtattaacgaaaatacacagaattatgttg

SEQ ID NO: 575 - DNA, 401 bp, Glycine max
ttctacatgtgaaaactcaaacaaaatagaataaaagaaaawttatttgaagctgaatgattttttaattttatttcaactttagtttgacttgatactgcaactagtgagtccaagactaacattaatactattttagtgcatgttgttcaacaaatataaataaactgttagggacaaagtcccacatgatgagctttkcttttagcttgcactccaaagctataaaagaaggcttggtggaccctttattaacattccaaaatcatttctcttctcttcctttatttatttagtctagttagagaaaaaaaatacgagaaaaaatagtttctccgttcytttagtagtagtattttyctctttgttaattagagtgtcaatgtgcttttttcttgtgt

SEQ ID NO: 576 - DNA, 401 bp, Glycine max
ctgagaagagaaaacggatgcactggagatcaaagtatrattagaacaaacataacagscatatcattcgtgatcacctaatcactgagaaccgaatgcaaaaatgcttaaaattaaacctttttaaygaattctttggtttaagaaaatacttttatattttaattttacatataaaaatattatattatttttgtaagmaaattactcgaacttcctttctattttgcattttttgtacattttttctatgtaattaaaacctacacaaattctctccctttttttggtgaatggaaggagagacccctaagaacaattaattcattaaaaatcctgagaaaacgtgatagaggatacatctgtcaaaactacagttgataaaaattgagaaacaatct

SEQ ID NO: 577 - DNA, 401 bp, Glycine max
acctccaagctctaggaacttcactatctcttgacttaaactaaagcatggatggtaagtaggacatccagtagtgagcaatataatggctacttgctagtctgattctacttcaaactgttggaaaccacgactccaagcatctrcaaaccaattttaatggcccacaattcatccatgacaacaraacaaattttaatyccattataactataagtgtgagrtgagatctcatatcgaatarttgaagrttataactgaaaaaaagacttataaatttaagatttaaagttttagattaaaatatgttgttaaatttctaatgttaaatctctcaaatttaaatcaaccctctctmctgttttatacaaacctccttttattgtatacacataattaca

SEQ ID NO: 578 - DNA, 401 bp, Glycine max
ttgcctgatggcctcggaagatttagtcaaatattgaattgaatgacawgtgtgatccatgtaactcttctcatttagaagatcaagcttttgttgttgcaccaacattacattagtccgagaggaaytagatttgaatttctttctcatgttccagtcttgtaaataaaaaaatgaatagttaaaactaaagattccacmaaaaatgataagtcagattttctgataaaaactaatcaaagtaaaaytatcataaaagacatgataactcaaaaaaagacttcgttgttggcattattgtaggctgatgaratgtgtctacatgtgtaataggccacagaacttaaatcagctgatggaaacaaggcttctcagcggacggggtcttccaaaaggaaccg

SEQ ID NO: 579 - DNA, 401 bp, Glycine max
taccatttttcttgccagaacgctcaacatgacaccacaatgtacgcaatgaatygatacagttcatggcagcaacccttatagtctggaagaaaattcaaaaaatgcaaasaaatcatttgagccgatgacattttctcaaaaagaaaacagcaaaaaaagtaacagaggataaccatttgtcaacaattataaattgcmagtttgmagaaaatgagaaaaaatacacacaaggtcagagagtaacgctaacaaaggatcatacctgattatcacccgccaatggaacaagaacagaaggaaattcagctaaaagttcaatttgccatttatcttgtgacaggctacaaagaaatgcatagcattgaagactttcaacctggactgcagcaggaacacct

SEQ ID NO: 580 - DNA, 401 bp, Glycine max
tgacagtgctgtaaagacattggctttaatcttgagttctgtggtcttcactttttgctaagcctttattacttggctcagttcaaatgaagttgaggtggcttttgagggatatatactcctcccactttgtacacctactctttcaaatgaagttttctaacaaaactcaattataccctccctcaccaacaatgtgtraaatcagtggccttaacaaattagatcagaaatgcaactcagttcaaatcattcaaagtagaacttaaatgtatcmaaaaaatatttccaaataaaactagtttaacagmaaaattttgtaatgcaaccatttcctaaaaaatataaaatcaaagagaagtaatataccaccaccatcagaaattacacacacctaaaga

SEQ ID NO: 581 - DNA, 401 bp, Glycine max
ctcagttcaaatgaagttgaggtggcttttgagggatatatactcctcccactttgtacacctactctttcaaatgaagttttctaacaaaactcaattataccctccctcaccaacaatgtgtraaatcagtggccttaacaaattagatcagaaatgcaactcagttcaaatcattcaaagtagaacttaaatgtatcmaaaaaatatttccaaataaaactagtttaacagmaaaattttgtaatgcaaccatttcctaaaaaatataaaatcaaagagaagtaatataccaccaccatcagaaattacacacacctaaagaggaattaatttacaccgttgtaaatcacacttactcttcaattattatgaaatgtaatttttgccaacaattgaat

SEQ ID NO: 582 - DNA, 401 bp, Glycine max
acatagtgccatattttaggacaggagttgatgttcatatatagatgaaggttattaagtcaaggtctatcttgaagacacattttcyctttttgcttttgtttttgtttaccactatatggtccccttttgcacttattgttttttttttttgaagtcccctttgcacttattgctaacggataccattgaatttaattrtaaataaatacattattcaatacagtttgaggcaggtgaagggttcctaaaaaaagttgccaggttaatgaaagacctcaaaatttatcacgatggctttgtgcaatttaattcaattttyccccatgataatgtcctgatcgcgtagcatttacagtttctgtttcagtaggtgatctagatacctagaaactttaatt

SEQ ID NO: 583 - DNA, 401 bp, Glycine max
tcaccactttatacagaagaattcartgacattttagattcataatatttggaggattaacataataacacactaatattcacaagattagaatacaattctaactcaattrattgartagaatatatgaattgttattgtaaatcttgagtattttgattcttataaataaaaatatatttgaaatattttattttagtraacaagagtacaataaaatattcatttaatcaaagtgaaaaaakaattcyttatattttgtataggttaagaatacaaatatgtagatggtggaaaattataatttaaaatgtaatatactacatataatattccacctaaacaccattaaagagatcggtatattaatgaacatttaagtaaaaacccaaaattaaaag

SEQ ID NO: 584 - DNA, 401 bp, Glycine max
aacggcacataaacaattgtaatgtctgaaaattcacccatttcaggatacagtgtaatgaagggttgaatgaagatggcctagggctctatgatgctctcataattatatagatagtatttggataatttaatattaaaaagaaaatttcagtaaattttatattatttaatttgttttatttattatccatcaaacaaygtataagacaaaaaaaattatcttgtaacttgacttgtgttgttcttatgttgtatccattaaaagcaccctaagtgaaaaataattgttacaataaagtagtaaaatgtrcaattaaacaaaaaaattattaaatgrgctttatargttttcctacattcatatatttgatttatgtttatgttaaaatttcttaacat

SEQ ID NO: 585 - DNA, 401 bp, Glycine max
ttgtaaaatcttctgataaattaaaaattactatcacgtaatttatatttataaatttttattratctaaaattatgaatatgtgaataacattgtagtactacaatagagtggakcgtgtactttaggaggaaggcaggtaagtaataagttggatctgtcgccttggccggtttgtgccacgtgattcttgttctgctyaactgtggactcatcagccccaatttctgactttttgcccttttctcttgggatctcaaagttaggttttggataatttttttagtaaccaattaattagtaaagttataaattatgatcaatctatatatgataacttttagatgaattctttttctatacaaattaaattrcatgatttgattttaacttataaaaaa

SEQ ID NO: 586 - DNA, 401 bp, Glycine max
atgactggcttcctgtaacaagcaaatataattaatgctaaataccagtacgacttctagaaatgataaatgacgaaacaataataattcattttaattagtattataaaaacaaaaattcgaaatagctcatacccaatgaatccaccagaaatgttgaactcgaagtagtagtttaataatttggttcaaaagaagaarcatgatagtactcagtagagtccaaaatggaatgctgcatttgtagtactaccaagttaagctagctggcatagcagtgtagtggcagtcaacttcatgcactctctctcgataacaaagacactttatttagattactgcacgtakgaatgaataggaaatatcaatctccaattcaacaatgcagccaaggtcacaac

SEQ ID NO: 587 - DNA, 401 bp, Glycine max
acaaaaatgttactttcttcttcccttcgtccgaactccgaatcattatccytctggtagctgttgagagttatatgcaagtcattattactttatcaagaatcacacgcaggacaatggaaaacaaacagtgcagattcggaatatttttgtagctatatatgtttggactagtccatgatcgtatatatatgtgtgtgwgttttgaaaacttagttgctaattaaaagagtagttgttttacttttgaaacaaattattatttaaaattaattttataaaaaaatacatatatttaamtttaaaattaacaagccaatattaatattaaagtctaaagagtttccaagatgtggagaagaatgttgctgatagagagagtcgcgcggtgttgacaaccc

SEQ ID NO: 588 - DNA, 401 bp, Glycine max
ccatatatatatctcaataaaaatattagggaatctatccatgacataatgaattcaatgcatacttaggccaaccgatttacacaaagcttaataagtgaaatatcacaacttcagataaagcgcaatttttttatcagaaaaaaaaaagagagctcaatagctaaaaactgaaggcttttatgaaaaacaacgagcaarcacyggtgatgaagcagaataaaaaagtaaggacttacgaagagaacatcttgaagtaagggttgcagcatggttgaaattttgagtgcttttggtgacccaacgaacaatgtaatgaaactcaaaaggaggaaggagtcacggaggcgcggtgswaaatcagttcattattgggcctccattttttggtttcagggcat

SEQ ID NO: 589 - DNA, 401 bp, Glycine max
tatgttgagatgaatgataattaataatatatagttggttgatgatgcatgcatgcatgtagatagctgaacacgagaaagcacaacaacggcaacaggatatgataccgggaaatgtgtgcgagtcaaccatacctccacaatcatatgaccgcaatttcttccctgttaatctcatagattccaataatcaatattcamatcaagaccagactgctcttcaacttgtgtaagtacactcatcwtccattgttaattacaagttgttgttattgaatgcccttttaataattattaattgatgaaaactaaaacaaggtagaggggcaatgaccaatgaaacaaacaacttaattactttcaacattgtaccattcctttatatgcatgcaaccatatat

SEQ ID NO: 590 - DNA, 401 bp, Glycine max
atgcatgcatgcatgtagatagctgaacacgagaaagcacaacaacggcaacaggatatgataccgggaaatgtgtgcgagtcaaccatacctccacaatcatatgaccgcaatttcttccctgttaatctcatagattccaataatcaatattcamatcaagaccagactgctcttcaacttgtgtaagtacactcatcwtccattgttaattacaagttgttgttattgaatgcccttttaataattattaattgatgaaaactaaaacaaggtagaggggcaatgaccaatgaaacaaacaacttaattactttcaacattgtaccattcctttatatgcatgcaaccatatatgcattatataaggtttttaaatggcyaataacaacatgggtttt

SEQ ID NO: 591 - DNA, 401 bp, Glycine max
tgtgtaagtacactcatcwtccattgttaattacaagttgttgttattgaatgcccttttaataattattaattgatgaaaactaaaacaaggtagaggggcaatgaccaatgaaacaaacaacttaattactttcaacattgtaccattcctttatatgcatgcaaccatatatgcattatataaggtttttaaatggcyaataacaacatgggttttagtgtgggaacgtggttagyggacgttcaacttaaatgactcaggctgtgtttgtattgccctttagcagtttcaacgccaaagctttctctcagtaaagttgtggttcaacgtgcattggaacataagaaacagttcaacttacatatatatcatttgacttgtttttaagtcatcaatgt

SEQ ID NO: 592 - DNA, 401 bp, Glycine max
aagttctacattttgtatgggttttatcaatgctctcttaattataaattaaatttggatggacatatgaaaaggaatctaccacttagatttaattgaygttaagtagtagtatttggtacggcatacggccccagtttttaaaacgttgtgtacagcaacacatccaaatcaaggttttaaaaaacagagtgggaggtsaaatggtttaattaattataattaataatattatttttatttttgatataatatattaaattatattaaacaaaaaatcacataatatttataacttcataatattaaaaaaaaatttaatttataaaattcatgactcataatatataatattaaaaattaaatatgaaactaaataaaatatatcataatatttaaat

SEQ ID NO: 593 - DNA, 401 bp, Glycine max
atcctttgcctttcccttcccttggaatgcccattagaatttctcccaagtatrcatgatcatacaacctcaaaatgaatttgttttaccatataaaaatattgtaaccttggaacacattgacattaccaataagacaataattaatattattttgtttcctatcgtatgctgtccttgaattgaggcgtttgcacatgytatttacttgggtatggatccagttttcgactagatttggaagaaaattcagaacatattataaaagatgcacatgaacaacatctttggaatatactagttaaaaagaatgtttaggaaacaaatccattgaagatcacaactccagaaaagatattggtgttgcgtacatttcaacatttccaaagtaaatggctgac

SEQ ID NO: 594 - DNA, 401 bp, Glycine max
caagagcctgcagcacaagaaatacaaatatcaaatcacagttctcactgtcttgctttcacaccacaaaaaaaatgtggatttctattctgtgctcatggtgtgcaaacattggaagattttyatgtttttcgatatatcaatactttcttttctattaaaaacttggggcgtttacttgcacttctattgtctrttttytttagttgcaaaaatgtcaccttgctttctatttgtttcctattgtcaaatacatgaaatggagggggggggggrrgrrgggggtttagcgtttcctgtacaattaaataaaaacaggaaacaaattgaaaacaaggttgtatttttgtaattaaaaagtgaaaacagaaaataaaagygcaagtgatcaccccyttagt

SEQ ID NO: 595 - DNA, 401 bp, Glycine max
ttccagctgctaattgtaaatcaggacaatttgacaaaaaaataagcaggagagggtgccaagaaacatagctcaaatacacaagtatacatatattgttagaatatgtgaaaatattttatcatatgttagagtgtcttarattatgttttaggattagtcttcctatactttcattatctctcaggattgctctatgawtaatataaataagggttaggacttcagatttcatgaatataccatccaagacatcgcaattcatcgtaataatcagtaaaatatcattcaaagcttctattctcttctttacctccctctatacctaaaaccccataatttcaacagatcaaataagcactaaagtaaggtcacccagacatataatcatattttatgat

SEQ ID NO: 596 - DNA, 401 bp, Glycine max
ctttacctccctctatacctaaaaccccataatttcaacagatcaaataagcactaaagtaaggtcacccagacatataatcatattttatgattgtgctgacatatatttccctcaacttaagtgctatagaaacagatggttatggtctttgtttggwgctcagtgcgggtttattttaagggagtctccaacacaatyacaaatatggagagaaattggagggctcttttatattggtgaattacttttatttctgattttaatgaaaaaataagggatattgaaaactatttagcactcaatctgtatcacagcctaaccatgaaaaaacgaaaattcatgactggaaagattaaagccaactcatttttcacaaataaaaaatctacttgcccaag

SEQ ID NO: 597 - DNA, 401 bp, Glycine max
gtccccttttgcacttattgttttttttttttgaagtcccctttgcacttattgctaacggataccattgaatttaattrtaaataaatacattattcaatacagtttgaggcaggtgaagggttcctaaaaaaagttgccaggttaatgaaagacctcaaaatttatcacgatggctttgtgcaatttaattcaattttyccccatgataatgtcctgatcgcgtagcatttacagtttctgtttcagtaggtgatctagatacctagaaactttaattagggcaagctttcactaatctaagaacagattgctgaacctatcttctgattattgtcgattttagatcctttaattggagctagctatgttttattgcttttggtttcatcagttcaaat

SEQ ID NO: 598 - DNA, 401 bp, Glycine max
tgtttctaataaacmattgtgaatgtatttatttcattatctaaattgcatttcttcacttcagagaaactttattttagagaaattattatttttttcttagtccccaccttatagtagccagtgacaaawaaattgacgtaaaaataaaaaagtaaatcctacgatttcatctttatttttgaatttggactacaagtytcaaaaagaatatattctctggaatctgtgattaactttgattgaactattaattttccttgcaaaattggcttttttattagtgttccttgtctttggaacgtgtacagagtgagtcttttctttccttttttttataaaaaaactaaaaacttaawtttctccttcaaaaattagagtattgctatattatttttcca

SEQ ID NO: 599 - DNA, 401 bp, Glycine max
gtaaatgtgggtttggttagatcaattatttaggagtggaagatgagtttcttttcatgttgcacgtcacaagagaagatcgacaagaactcattgaaaaagagcagtaagaactaccatcacgcaaaagctctgccgtcgttagccaacatgtgttttaaatctggtatttttcctagctccaatgctaattttctcatygtatcgattttcaggccaacattttttcaatttaatgtctcatatcyagagtttaatgttgtttccacgacaaattattttcctctagcacaatcttatttatctcaacatgaaatccatgaaaggtttataccatcacaataggcttcatcaactttttcattattatgaagcctcaacgatgtgaaatgcagaagtac

SEQ ID NO: 600 - DNA, 401 bp, Glycine max
tttcttttcatgttgcacgtcacaagagaagatcgacaagaactcattgaaaaagagcagtaagaactaccatcacgcaaaagctctgccgtcgttagccaacatgtgttttaaatctggtatttttcctagctccaatgctaattttctcatygtatcgattttcaggccaacattttttcaatttaatgtctcatatcyagagtttaatgttgtttccacgacaaattattttcctctagcacaatcttatttatctcaacatgaaatccatgaaaggtttataccatcacaataggcttcatcaactttttcattattatgaagcctcaacgatgtgaaatgcagaagtacatgcatatcttgtgcatctctttaggctccctttctagtttaatgat

SEQ ID NO: 601 - DNA, 401 bp, Glycine max
ctattttctgcccccacacaccatgtagttctcatatatatatatatatatatatatatatatatatatatatatstgtgtgtgtgtgtgtgtccccacacgctatatccctttcctccttgattacaaatttccaaatgcaagacgacacaaaaatgttactttcttcttcccttcgtccgaactccgaatcattatccytctggtagctgttgagagttatatgcaagtcattattactttatcaagaatcacacgcaggacaatggaaaacaaacagtgcagattcggaatatttttgtagctatatatgtttggactagtccatgatcgtatatatatgtgtgtgwgttttgaaaacttagttgctaattaaaagagtagttgttttacttttgaaa

SEQ ID NO: 602 - DNA, 401 bp, Glycine max
gacttgataagactgcagttgaaaccataatccattatgaatttaaaaattgtagtaaaagggaaagattaccatttatgtctacctctacaagacctccactagagttctgttatcaataaaattcatcattctttccttttatctgatccagttctatcagttttgttcttcatttatkcaaaagctaaaagtaaatawttttcccttgcacagattttaaacctccatcaggggaaggcaaaagaacttatctcatactggccatcatcatagtagctggtgttttagtggttgttcttctggtgctggttmtcttgaggaggatgggatggttaggaggcaaagatccagtgtataaaggtatggaatatgcccccaagttcttccaattcttttag

SEQ ID NO: 603 - DNA, 401 bp, Glycine max
ttcttcctcagtaatatgwtgctgctgcaaatgattctgataacagacaacttgcgaatcagaatgctggatgatgttgatggatacaagctgctaatgacatgtacgacccagcccatttggtttagttgtctattttaggaaaaactcaagcgtaaaagttttttttttatctatataaatagaagataagtattaaawtttttttataataactgtttattcaattaaattaaatccttttactgcttacccttaaaagatgaaagaattttaaggaataacaaacgaagggtcattttgttacatgcaatcaaattttgtttcttcttttttaggcattaatatatatatattttttttgtttctaacaaactgtgttgtttccattataatttgta

SEQ ID NO: 604 - DNA, 401 bp, Glycine max
tttaataaatataaataagatgaaagataaagtaaatactactacatcttaatgagggttgaagtgaaaattagcattaccgagcctttccctcttattattctgttaaaacttaaaattaaaartgtcaygatcatagttataaaawctggttcaacatgatcagttgaatgagtttaattgagattcgatggcttaatygaattggttttattattagattaattgcacaattaattcgggatgatttgatcaaatccaactagttaggtatcatattttgattatatwgrtctgatccaactgattttataaaaaataaaataaaacgaatcacctctataacgttattttaatatctcattagttatcttgaattttaaaatayaaataaatttttc

SEQ ID NO: 605 - DNA, 401 bp, Glycine max
atatatatctcaataaaaatattagggaatctatccatgacataatgaattcaatgcatacttaggccaaccgatttacacaaagcttaataagtgaaatatcacaacttcagataaagcgcaatttttttatcagaaaaaaaaaagagagctcaatagctaaaaactgaaggcttttatgaaaaacaacgagcaarcacyggtgatgaagcagaataaaaaagtaaggacttacgaagagaacatcttgaagtaagggttgcagcatggttgaaattttgagtgcttttggtgacccaacgaacaatgtaatgaaactcaaaaggaggaaggagtcacggaggcgcggtgswaaatcagttcattattgggcctccattttttggtttcagggcataata

SEQ ID NO: 606 - DNA, 401 bp, Glycine max
aaatgatgatactttttataagacattttagaatttttataaaatatttaatttttctttcattggttgatcttatcaaatagtctaattaattatgagttgtattaattagtatccttgtaatattgattaataaattaaaatgagtaagtatttattgtgtaaaacataggaaagtataacaaaattatgaaaaacaawttttttatcctaataaaaaaaatttcttttagtttcttaactaatattctaaggacatatgttagtattagtcttttaagtatttgtgtttttttttttttatagtaatgtataatactctagtattttaaccataasttaacaattattaataagaacataattgacgcactagtagtatttttttttaaattcaatat

SEQ ID NO: 607 - DNA, 401 bp, Glycine max
ttatctatttcatcgacatgattgacgaaccataccgttattaatttgctgcattgtagagggctttaaatagattgcacgctgttattctttatctgtatgagatgctaaggcatctcttaatttattcttgtgtgtataaaaaaaagaaaatatgcttgcattccaatactccaacctcttaagtatattaagatcaayggtgtattaaagacacaaccaaacaacgatcagtattaatatgttaaatatcacttttggtctttaatttatctttttttattcaatttgattttcttcatcttttaaaatattcattttagtcttaactcgagtctgttacgcagaagttataatttctaactttcggtcgacacacagaaattttgattaaatgcgga

SEQ ID NO: 608 - DNA, 401 bp, Glycine max
tgttatttggttcttataaatttttttctttactttccatccctttaaaatttaaaattattgatgttttccttataatatgaataaattttgattttcatccctataaaatatttttcttattttaatctctagaaataatttttaagatattacatgtcaacattgtaccatatatagacactagttgttgttacctarraagatcgcttgacattccgtgaataggggacgatttaaggactygagagayctaaaataaatttaaaaatgagatcttttatttactcataaaataatttattaaaattattattattttaaagagaatagaaataaaaaaagttttttagtttctttaacaattaactattaaatctcttttttctaaacaaagttat

SEQ ID NO: 609 - DNA, 401 bp, Glycine max
tgttgttattgaatgcccttttaataattattaattgatgaaaactaaaacaaggtagaggggcaatgaccaatgaaacaaacaacttaattactttcaacattgtaccattcctttatatgcatgcaaccatatatgcattatataaggtttttaaatggcyaataacaacatgggttttagtgtgggaacgtggttagyggacgttcaacttaaatgactcaggctgtgtttgtattgccctttagcagtttcaacgccaaagctttctctcagtaaagttgtggttcaacgtgcattggaacataagaaacagttcaacttacatatatatcatttgacttgtttttaagtcatcaatgtaggatttgttattcagcawmtccccaatccaaatggca

SEQ ID NO: 610 - DNA, 401 bp, Glycine max
gcaggttcctttgcttcttttttgaaaggtttgtatcctcaaagattatataagattaatgttatcatatatcaaattttgaaaacaaattttatacaagagagatagaaaaacaataaatgttataagataaatggtagtataatattattggtggtattctacatgtgaaaactcaaacaaaatagaataaaagaaaawttatttgaagctgaatgattttttaattttatttcaactttagtttgacttgatactgcaactagtgagtccaagactaacattaatactattttagtgcatgttgttcaacaaatataaataaactgttagggacaaagtcccacatgatgagctttkcttttagcttgcactccaaagctataaaagaaggcttggtg

SEQ ID NO: 611 - DNA, 401 bp, Glycine max
tttggttcaacttctataccaagaggagcctttggtgtgagtgtgtgtgaccatcatgctgcacatgcaggaactcttatgcagagtttttttctttaaagtaaaaaaagtaatacagataaaataaaataaaataaatagcttacaaaattgattttcctaccttcaagtcatcgayccaaggggcgctaaatttagcgyacactcagccgccagcaccacgwactcacgtagttttgttttcgtgtaccatactcaatacttwaccgcaattttgatactagttaactagtattatttatttcttttaatcattttcctagtgtttaattaattattatttttyatcatcaarcatgtggattawctgacttaraattctttttagtttaatcagatat

SEQ ID NO: 612 - DNA, 401 bp, Glycine max
rcacccaacattcttttaaaatgacaaaattaccccttccttctttctccctttatgaatcaagttgatccgtaaagatttacggatcaagttgatccgtaartcttraaaatcaacttgcrgatcatctatatcaactgcgratcaactaaaacctatgcggatcaacctgaatgagttgggtgcacaaaawtwtttttraaaatatacaagggtatttttgtcttttcatattaagtgctgggtgcaccagcaataatgctggstgcacctagcaacaccctttttaatattaactwtttttgggctttgatttgcctaattgtgcaagacacagccatgtaaagcccaaaaagaaaaattgccatcaaaaccaacttcctccaatcagacctttttgc

SEQ ID NO: 613 - DNA, 401 bp, Glycine max
tgctccattaacttttcagaagttacaaatatttgaacacttttatctyttayaaatcaaatcttrtccaagtttggtcacactcaatattctttgttctattatgtcttttaagtatgagttgtctcgtaatgagtaaatcttcatttgttgtctcgtaatgggtaaatctttgtttgtatgagatcaactgtttyaatmttyaaaccttctagtttatataggycttttaagtatttgttgtcttgtaacgagtaaatcttcatttgatcttcgtmtgataaakagagtcgttagatrcatttaatacacgcttttcctcatrcataaacacctttgtttaagrtttgtgtgtacgagaaattacaaatakatcctatgtarcttttcatagtgaacat

SEQ ID NO: 614 - DNA, 401 bp, Glycine max
tccattaacttttcagaagttacaaatatttgaacacttttatctyttayaaatcaaatcttrtccaagtttggtcacactcaatattctttgttctattatgtcttttaagtatgagttgtctcgtaatgagtaaatcttcatttgttgtctcgtaatgggtaaatctttgtttgtatgagatcaactgtttyaatmttyaaaccttctagtttatataggycttttaagtatttgttgtcttgtaacgagtaaatcttcatttgatcttcgtmtgataaakagagtcgttagatrcatttaatacacgcttttcctcatrcataaacacctttgtttaagrtttgtgtgtacgagaaattacaaatakatcctatgtarcttttcatagtgaacatgac

SEQ ID NO: 615 - DNA, 401 bp, Glycine max
caaatatttgaacacttttatctyttayaaatcaaatcttrtccaagtttggtcacactcaatattctttgttctattatgtcttttaagtatgagttgtctcgtaatgagtaaatcttcatttgttgtctcgtaatgggtaaatctttgtttgtatgagatcaactgtttyaatmttyaaaccttctagtttatataggycttttaagtatttgttgtcttgtaacgagtaaatcttcatttgatcttcgtmtgataaakagagtcgttagatrcatttaatacacgcttttcctcatrcataaacacctttgtttaagrtttgtgtgtacgagaaattacaaatakatcctatgtarcttttcatagtgaacatgacacatgagatyctgacttttgac

SEQ ID NO: 616 - DNA, 401 bp, Glycine max
agaattaaaaggtgggaaacaaaacaaaaggcataaacactacaaraattccggctattacctaaaacccactgtaaatcaaaattaaattaccawcaacttacggaaggctacttatccctctactataatcttgttgatatatatatatatatatatatatatatatatatatatataaatcracratcatgaaaaaamctcagcaatatagtggactaaggccaagctcattrtaattygaggataatacagtgtgctcttaatttcgtcagtaatttaaccttggataatagcaaaggaaaagacgttagtaattttagtaaaaatacattcgcagctagctaattgttaatgcttaaaggtgtgctgaattaaatggtggtttagagcaaactaac

SEQ ID NO: 617 - DNA, 401 bp, Glycine max
gaccacttttaatatcatgtatctattgcatgtttgaaaagttgtgtcgggggaaataatttccagataagctgccaaaaaaatttctttgcctccaaaataagcttatacaaacacaaagtaagatcaaacttcatggtgaatgraatttccyagtaacttaaaatgcatccatggtcattgctttcagaattcagaagmacattttcacacaggtattcaaacaatttttttacagaagtttagatgtgatttctcaatcaccaaatgagattttcaytaaatattattttctttagaaattcattgattcactcttggtacgaattattagatcaaccttatgaagcacaccaggatatataatttggggtacaggatagtgatcagctttctacaat

SEQ ID NO: 618 - DNA, 401 bp, Glycine max
gtcacttgggtatgtcwtgaagcttttattatgtgcctagaatcatatttctctggcctaaaatttcaggattcataatctaatcaagggtaaaatgtgttccmatattttatcaaaattggttttagtccccatattttaaaaataataattttggtcatcgtattttttgtaatgggtgaatttcatctctggccttarmatcatatgtgcctagaatcatatwtttctagcctaaaatttcaggatttataatctaatcaaggataaaatgtgtccccatatcaaaattggttttagtcccwatattttaaaaataataattwtggtcatggtattttttgtaattggtaaattttatctctggccttagtatcatatgttccgtaaagagagattat

SEQ ID NO: 619 - DNA, 401 bp, Glycine max
tcacttgggtatgtcwtgaagcttttattatgtgcctagaatcatatttctctggcctaaaatttcaggattcataatctaatcaagggtaaaatgtgttccmatattttatcaaaattggttttagtccccatattttaaaaataataattttggtcatcgtattttttgtaatgggtgaatttcatctctggccttarmatcatatgtgcctagaatcatatwtttctagcctaaaatttcaggatttataatctaatcaaggataaaatgtgtccccatatcaaaattggttttagtcccwatattttaaaaataataattwtggtcatggtattttttgtaattggtaaattttatctctggccttagtatcatatgttccgtaaagagagattata

SEQ ID NO: 620 - DNA, 401 bp, Glycine max
aaaaacaaaccaaactataaaacagttaaatttattatgtaattcagactactaattctaagtcaagagcacaccaaacccctcgggaagactcctatttatgcctccgccgaccgagagggtatcctagccttccgatcataagattacgtggcaattaaatattataacaccttatttttatttgcggttttattttawamgtattttatattaatggccaaggtttttcaaatattttgtcyccttatttaagtagctggctcctaatctgtttaactgtggagggagcaggagcactcggaggtgatttctgcctcaatggaggtctmtgctttaaggccacactgccctttatgccgccgccgccgcttctcaagtcccttctctcttccttccat

SEQ ID NO: 621 - DNA, 401 bp, Glycine max
aaacaaaccaaactataaaacagttaaatttattatgtaattcagactactaattctaagtcaagagcacaccaaacccctcgggaagactcctatttatgcctccgccgaccgagagggtatcctagccttccgatcataagattacgtggcaattaaatattataacaccttatttttatttgcggttttattttawamgtattttatattaatggccaaggtttttcaaatattttgtcyccttatttaagtagctggctcctaatctgtttaactgtggagggagcaggagcactcggaggtgatttctgcctcaatggaggtctmtgctttaaggccacactgccctttatgccgccgccgccgcttctcaagtcccttctctcttccttccattt

SEQ ID NO: 622 - DNA, 401 bp, Glycine max
ttgttaggttttaaaaataaatattaaacaataatgataataatwaaataactccaatcaaggggtacctaaaattctaaaaaagaagtactatagactacagtagtctcaaactgatattttgggtccaggtggaatggcatctgactgacattatcttcagttcactaagatatttagatttaatgggccccactaatkttattttcttaaaaatatcttccattcagtagtsattccctctgcttatattcttgatcctctgatgctggtgccatcctgcattatctttttagctcaaatttttgtgaagcatttttattggtagaaatggagagtgagtccgtgaagcgcagaattcacatgattgctgctcactttgcacccaatgatgatatttc

SEQ ID NO: 623 - DNA, 401 bp, Glycine max
aactaagtcattyaaatcaacaaggtactggaaagtcacgagaaggaagaaaatttgcaactgaaaatacaaggtagacattgaagaattaagattatgattaggacgtctcasgggaagcctatgcagagacgtcaacataaacctggtcaaattctgtaataaaaaaaataatgaatcatactaacactccatggaaayggaatttaatgatattacactaagtatttttctttttttttatcatgacttaattcatataatatcgtaaattaagaaacattgtattaacgaaaatacacagaattatgttgctatctaaatggaaagaaatatgtataaaatcaaccaaaagacctatgaaatataatattaataaacctagctcacatacttaagat

SEQ ID NO: 624 - DNA, 401 bp, Glycine max
gttatttggttcttataaatttttttctttactttccatccctttaaaatttaaaattattgatgttttccttataatatgaataaattttgattttcatccctataaaatatttttcttattttaatctctagaaataatttttaagatattacatgtcaacattgtaccatatatagacactagttgttgttacctarraagatcgcttgacattccgtgaataggggacgatttaaggactygagagayctaaaataaatttaaaaatgagatcttttatttactcataaaataatttattaaaattattattattttaaagagaatagaaataaaaaaagttttttagtttctttaacaattaactattaaatctcttttttctaaacaaagttatg

SEQ ID NO: 625 - DNA, 401 bp, Glycine max
tcttttttctaaacaaagttatgatattgrtgaaaagttattacttattaattgttacttatartaccaataaaaagattaacagttacttataatattttaattaaaatttatttttaaatataattttacaataattttttttaaggtatattartactaaaaaaaatttgggatcttttttttttgaacctaaagccsttgtttgggccttaagccagcctgtcgctgaacatataagctattaacgaatgtcacacaataataatagagatcaaaaataaaattttaactttttgcgggatgaaaattacaagtaaaattataaggaaaaaaaaatcaaaattactaattttatagaaattaaaaatatatttaagtcaaattataaagatacaccc

SEQ ID NO: 626 - DNA, 401 bp, Glycine max
aaactaaatatacatatttatttgactttttcgtataaatttaacagatcwtaatttatatgcaatagtttttgtatgcaaaatggaaataagttrgtcaaaagttwtatatatatatatatatatatatatatatatatatatatatatatatatatatatattgttattacacaaattcccagtaatatttgaaatcgwtaaggtgggatattatgtatcattcggaaaaagatcaggtgttaatgttaaaaaawttttatcaagaaggtaagggatgaacttagaaaaaaaggaggtgaaaacaacagttccgaaatgacagcaatccagtaaccgactaaagtgsaaaactgcaaatcgtttaccgaacacaacaatgggttgtccttttgcatcta

SEQ ID NO: 627 - DNA, 401 bp, Glycine max
actattwaatcatgtttataattataaatttacatgtgcacagaaaagtaatgttatttatrtattgtaacattgtatttagaatattttttataacattatttgttccgaactgttactcgacccatcttggtctatttgattagagtagacatgttgacccaaaaactatagaagtccaattcatcactackyaacaakgtttaatgttcctcaccacttcctaatgttgcacaagartcaagagctcatatatacgaacgtgaaatgctgaaamatatgacataaaactgtcagcaatgaacacccccgaattgtgggattaagcgttcgtcacattatcttgcatgagaattatcatcctagcttgaagagagccataagtgwaaacacaaaatatg

SEQ ID NO: 628 - DNA, 401 bp, Glycine max
atgcaggaactcttatgcagagtttttttctttaaagtaaaaaaagtaatacagataaaataaaataaaataaatagcttacaaaattgattttcctaccttcaagtcatcgayccaaggggcgctaaatttagcgyacactcagccgccagcaccacgwactcacgtagttttgttttcgtgtaccatactcaatacttwaccgcaattttgatactagttaactagtattatttatttcttttaatcattttcctagtgtttaattaattattatttttyatcatcaarcatgtggattawctgacttaraattctttttagtttaatcagatatmtgatattcaggtcttaactatgtarttatattaaatacttagaagaaatttttgtttatcctt

SEQ ID NO: 629 - DNA, 401 bp, Glycine max
ttgttgatrcacccaacattcttttaaaatgacaaaattaccccttccttctttctccctttatgaatcaagttgatccgtaaagatttacggatcaagttgatccgtaartcttraaaatcaacttgcrgatcatctatatcaactgcgratcaactaaaacctatgcggatcaacctgaatgagttgggtgcacaaaawtwtttttraaaatatacaagggtatttttgtcttttcatattaagtgctgggtgcaccagcaataatgctggstgcacctagcaacaccctttttaatattaactwtttttgggctttgatttgcctaattgtgcaagacacagccatgtaaagcccaaaaagaaaaattgccatcaaaaccaacttcctccaatcagac

SEQ ID NO: 630 - DNA, 401 bp, Glycine max
gttgatrcacccaacattcttttaaaatgacaaaattaccccttccttctttctccctttatgaatcaagttgatccgtaaagatttacggatcaagttgatccgtaartcttraaaatcaacttgcrgatcatctatatcaactgcgratcaactaaaacctatgcggatcaacctgaatgagttgggtgcacaaaawtwtttttraaaatatacaagggtatttttgtcttttcatattaagtgctgggtgcaccagcaataatgctggstgcacctagcaacaccctttttaatattaactwtttttgggctttgatttgcctaattgtgcaagacacagccatgtaaagcccaaaaagaaaaattgccatcaaaaccaacttcctccaatcagacct

SEQ ID NO: 631 - DNA, 401 bp, Glycine max
tgaacagaaaaaaaaaataaagcgacttactatttttaagatttgaactcctgaccttaaagtcatgcgacgacaactttaacgttctcataagacaaaaaaaaatacaacacaaattaaagtgtgttaaacaagtgatatacgtaaaatatgattagatgttgtttgagaatatacggtgtatcactattaaatcaagawatcacgccacatgcacaagcaggtatatataaacaattgttcctttatttattttgaaagaagaaaaattgatttgctttagaaaaaaaatgaaccacacactgactttagaaagattaagatagagaaacactccccaattagctccaaacactaaagtgaggtgcaaaagtagaagggaataaaagcaagaagaaaaa

SEQ ID NO: 632 - DNA, 401 bp, Glycine max
ytataatttttacaatataattataaaataattaaattattatattatttcacttttaaaattgaaacacatttaaatttatagagtaaattcattattttcttctgattttataccagaaagaaaactactttcttgtgatcttccacgtggaactagtmtttgcattcaacttattgtaaatcatatatatatatatawataaagggaatggatatcgtccgaactgaattcgaccctacaaagtaaayaaacatgattaaaaggtaaattcttactgcatagtagtaaataaaataaaaggcaagtacttttaaaaataattaagaaaaatatacgaagcccttaaattactcggagaaaaagaagaagaaaaaaacgacaaggacttaaaaaagtgc

SEQ ID NO: 633 - DNA, 401 bp, Glycine max
arttatttcgaatttagatttcatctawttgttttgttgaaaattcctataagcatttgtggattgaatgcgaaaattgttgagttaaattataaaaaaaattaaataaaaaataatatttgcgaacaatataaatatcatttgtcaagatatyccttaaccgaaatgtaatgattattttcttgagatataactatttawtaagttgacatctttaacatatgtttttaaatacacacargttaagcataaggaatcgagttcaaatccttaaccacatatttatgagataaaaytatataccaattacattagtgtgaagaaagttattagaagactttgcamtcgtagtggaagactasattagagtatcaactgctctctctattttgctgggttgc

SEQ ID NO: 634 - DNA, 401 bp, Glycine max
atcctacgatttcatctttatttttgaatttggactacaagtytcaaaaagaatatattctctggaatctgtgattaactttgattgaactattaattttccttgcaaaattggcttttttattagtgttccttgtctttggaacgtgtacagagtgagtcttttctttccttttttttataaaaaaactaaaaacttaawtttctccttcaaaaattagagtattgctatattatttttccaaaaaaattggtaattaaaatatatattaaaaattaaaaataactaattttatgtcaccactttatacagaagaattcartgacattttagattcataatatttggaggattaacataataacacactaatattcacaagattagaatacaattctaac

SEQ ID NO: 635 - DNA, 401 bp, Glycine max
ttatacactaccgtacaaaattatacatatagaacattgaggatgactctatgtaggagawgattaaactaatcacatggttgaagtygacttccaagtatcaatcatatttgataatttcaaacarggrtctctatattctcatgcttctatattttggtggtctcctataagtgcaaacatgtcttcgtctctcaaagrggtatraattygaaactcacaaatttagtatttattatttatataaaagaaaaaagaaagtgttagaaaatatctaattaagwgaatgatgaattttaatttatratataaataagaataaattcttcyataatttgatgtgggtgtcactgccatagccaatgamaatgcctaaggagaccttcagcgttcaaagtggg

SEQ ID NO: 636 - DNA, 401 bp, Glycine max
taaaattattgatgttttccttataatatgaataaattttgattttcatccctataaaatatttttcttattttaatctctagaaataatttttaagatattacatgtcaacattgtaccatatatagacactagttgttgttacctarraagatcgcttgacattccgtgaataggggacgatttaaggactygagagayctaaaataaatttaaaaatgagatcttttatttactcataaaataatttattaaaattattattattttaaagagaatagaaataaaaaaagttttttagtttctttaacaattaactattaaatctcttttttctaaacaaagttatgatattgrtgaaaagttattacttattaattgttacttatartaccaataaa

SEQ ID NO: 637 - DNA, 401 bp, Glycine max
ccagcccatactacaatttttaatagtgttgctagrtgcayccagcattattgttgatrcacccaacattcttttaaaatgacaaaattaccccttccttctttctccctttatgaatcaagttgatccgtaaagatttacggatcaagttgatccgtaartcttraaaatcaacttgcrgatcatctatatcaactgcgratcaactaaaacctatgcggatcaacctgaatgagttgggtgcacaaaawtwtttttraaaatatacaagggtatttttgtcttttcatattaagtgctgggtgcaccagcaataatgctggstgcacctagcaacaccctttttaatattaactwtttttgggctttgatttgcctaattgtgcaagacacagccatgt

SEQ ID NO: 638 - DNA, 401 bp, Glycine max
tctcgtaatgagtaaatcttcatttgttgtctcgtaatgggtaaatctttgtttgtatgagatcaactgtttyaatmttyaaaccttctagtttatataggycttttaagtatttgttgtcttgtaacgagtaaatcttcatttgatcttcgtmtgataaakagagtcgttagatrcatttaatacacgcttttcctcatrcataaacacctttgtttaagrtttgtgtgtacgagaaattacaaatakatcctatgtarcttttcatagtgaacatgacacatgagatyctgacttttgacttctttccttcatagtatttgatagattctagaagaatattcacrcaaatatmatatcatggtacacartaataaataaagttttgaaggttatatcac

SEQ ID NO: 639 - DNA, 401 bp, Glycine max
tgccgtttaaccttccaattttgctgcaacctgtccacatatcaggtcatttgataactagtgacgtaagctataagctagcgttctcctatwgtgagtttctttaaattattgatgaaatgaatacaggcgtgttaagttacttgagaaccagcttttgaaggcaacgaaacatggttatttgtgatctaaacatgttcycaaattcttgtcagcattgacccaaataagttaatagtaaaggcaaagttaagaaaggaaattcacctgataagggcaccataaaacctagcttcccgagcaacctgttgttcaaaagccttggcagattgcttgaaatatttcccaacatgctgcagagaatagacagtttgttaaaagatttcattacttgtccaagt

SEQ ID NO: 640 - DNA, 401 bp, Glycine max
atttagaatattttttataacattatttgttccgaactgttactcgacccatcttggtctatttgattagagtagacatgttgacccaaaaactatagaagtccaattcatcactackyaacaakgtttaatgttcctcaccacttcctaatgttgcacaagartcaagagctcatatatacgaacgtgaaatgctgaaamatatgacataaaactgtcagcaatgaacacccccgaattgtgggattaagcgttcgtcacattatcttgcatgagaattatcatcctagcttgaagagagccataagtgwaaacacaaaatatgcacactcaaattctttttttattttttataatgcacactcaaattctaatttacttcaccttgtatgacatacatt

SEQ ID NO: 641 - DNA, 401 bp, Glycine max
aaagcttacattctttwtttcatagatcatgcgatgcacttagaatttctgcatgatttctctgttactggcattagtggatccgtgaytttacgtgattcatcttctcaagtctgattcctgagctraaattattaactgagatatttttgctcctaatatcttatgtaattgatctgagtatgccattttttaatgcamattttggattttggggagaacccaactgcgatctgtaattggaggataacactatgatttttggttttggggttkatgtgtaatttattggytgattaattttcattttcttcaagattgataagctacaatctacgtttcaccaatgggaaaagactgctgatgctggcgagcgatccaatctatcaaaggaagttctt

SEQ ID NO: 642 - DNA, 401 bp, Glycine max
cttaacagtcttggaaggcgagtatttgacgtctatatccaggtaacaattacttgcttgatttgcaaatgatgctaaataattgatttgcactgagttgtgcattgatgtatatgaaatatattattatgtcctaaaattaaggggaatttagtgctgaaagactttgatatccgaagagaagctggtggtactggcaartcaattgagaagacatttaatgcttctgtcacccaacatactttgaagattcacttctattgggctggaaaaggaaccactggcatacccacaagaggagtttatggacctctagtatctgctatttcagtraacccwagtaagtcacattatcatgcatcttagtgtcagtrctttatctgacttgataagactgcagt

SEQ ID NO: 643 - DNA, 401 bp, Glycine max
agctccttggcaattgaataccgcaacaactccagaaaaatcattcatgttccaaatcttcagaagactgcaaaagcagcatccaaggagttaagtaaaatacaaatataaagaagcatgcatactatattttgtagtagagtgtaaaaagtaagatactacatcaattggtcaagtatataactatataggwagccaaaycattttggattctttacctctttccatctctggcaggatcagtaaataagcaatcctttgttggtcgtcctggaagtttagcccttaatatagaaccatcaggtagtgcaagyttcttcaaaagatcaaartcatggtgtccgggcttgtcactgcacaatataacaacatccaaaggtaagatatcatttatcaaataa

SEQ ID NO: 644 - DNA, 401 bp, Glycine max
ataaaaaaagttttttagtttctttaacaattaactattaaatctcttttttctaaacaaagttatgatattgrtgaaaagttattacttattaattgttacttatartaccaataaaaagattaacagttacttataatattttaattaaaatttatttttaaatataattttacaataattttttttaaggtatattartactaaaaaaaatttgggatcttttttttttgaacctaaagccsttgtttgggccttaagccagcctgtcgctgaacatataagctattaacgaatgtcacacaataataatagagatcaaaaataaaattttaactttttgcgggatgaaaattacaagtaaaattataaggaaaaaaaaatcaaaattactaatttta

SEQ ID NO: 645 - DNA, 401 bp, Glycine max
attagctagctataaatccacgatactactaatattgcaaaagtatatatatatatatatatatatatatatatatatatatatatatatatatatatatatatatatataaccatattaaattttacctttcagcagatataaattttcaggtagacttttatacgtatgtgtgggaggggatcgagttaggcgtaaacwctggtttttgggttggattataggtttaatatctggatatccgcttatttgttaatctcatctaattcatctgttaatttgtattaatttattattattattattattattattattatacatttctttatcaacttaattgtttctcattaatactctcattaatactttaagagagaataattaagaatatgtaagaa

SEQ ID NO: 646 - DNA, 401 bp, Glycine max
cccttatttgaatttwtctctttcaactccccggaagggggaaaagtgttaaaaaaaaagttcacatttgtcagaagctattaaaaatttaggccttcagttcattcatcgtcttcattgatgattagaagtattctgcttgtcttcrcccttgtcttttggaaatggagaacccttggatttcaatatctgttggcatastctgaaaacccatcaaaatagaacattcattagttttgagataaaatcaatgtatataatgacaatcaagttaaattggagcaaaygaacaatgctttgcttcagaaaggggtataattctgacccaaataaatgatcatagtaccctacwgttatgcatctctgaaaaggaaaacagaaagttaaaatcatacgagttt

SEQ ID NO: 647 - DNA, 401 bp, Glycine max
aatactgycctccyaatcttacatcataggtattgccgaaggctttccccactcagagactccatttcctgcagaatttcctgagcaagagatttaactgaaagctccacatcctcaagcagttcgccaaggaaggggattgtttcagctatgaacactagatattcttctttcaagttctccacaaaatatttaacaatyctgaggcccaatattttagctcgcaatttttcactccgtgtctgcatcaaaacctgcaaaaaaccagataaagaagccagaaagatattcagttgcttaggaatacaagtatttgcggggaacaaacatatagcattcaagagctatwcatattactgaatacccaaaactataacaacaaactaatgggctaaagttca

SEQ ID NO: 648 - DNA, 511 bp, Glycine max
  misc_feature (1)..(611): n = a, c, t or g
tctctnatgttctccaggttaaaaacacaactttccttggtatatttatccncnatacctctgctaaggtgatgtgcagggcctctgaaccaccatctagtgttcattgtgaatatgcagaatttgtagactaagtgcccaaagggcttgctctctaaatccaagaatcaacaatgttgttatgcatctgcaaagtttccaaaagggttattagctgtaaaaacatctccctctcccactcaaaaggctctcttctccaccaaaaactcccaaagaccatatgccattcctctaaactccccatattcccgaccaccttcaacttttgttccgagattaaaaataaccttggaaacaagtttgccaacaatttccatccgcccaagtatcaaccccaaatctcactttatccccgattcctattttccactggatcccattatcaaaccatttttcttgattaagctccctacacaccctctttttaagtccctccaccacatggtcatag

SEQ ID NO: 649 - DNA, 792 bp, Glycine max
atctctgattaccacggcagcttcctttccattgacttcaatgtccttagacaaaggaccgacttacctgggccatcagactatcttctcagcttcacccctttagaggtcttgaatggtgacacaacggattgtggggattccatgatatcacagtgattgggaacctgacaaagcaaaaaaaccttcaacaaattcaagtcactctatgtaaagcaaagattcaaaccaacacaacaaatgattatttgaacttaaacccaaacttcaaacaggaacaggaagaactaaaaaatcactattccaagaccaaaactgctaaaactcagcttgaaaatacttccatacaagttgcagcctaggaaggcttaagcagataaaaaaaaagagaaaatttttagtatgtgaattgtgaagaacaaaaaaatagaaaaaggaaaggcaacactcaacccccaaatgtgaaagagaagtaggaagcttcaatttgaatttctcctaaggactgtcatttgagttgtcaactaacaggaaagaaggcaattgagaaacaacaacccctgttcttaccttaactataaagaaaaaagaaaatttattttttttttttgttcaaggccccccaaacccggagtgggggtgaaaaaaaaaatcccagggagcgagaacgggcgtgttttgaggaaaaaaaaaataaacactctccccccccccccccccaaggaaaggagaaaaaaaaaaaaaaaaaatttggggggggggggggggggggggagaaaaaaaatttttttt

SEQ ID NO: 650 - DNA, 603 bp, Glycine max
attaataaaaaagattgccaagaaactatgatttatgaaaattaattttagctcactttcccaaaaaaacattctcatgaagtggataggaatacaactttcccaactacaggaaaagttctagatatgtattttacattaatttttaattttcatgaaacatattaaaattaaccaaatgtattttataatttctaggaattatgatttctaggaataaattttcctaaaaattatatatgcgtcatttgttgggttggatccgtcatgcatgtgacctcatgtgacccaatccaactcggcatgactaagaactccggggggcggggggtcatgcattttttagtttttttttccaattgaacaacgttactcatattaaaaaatttaatttatatcttacacttatgttatttatagatttgtttatatttttttaccaatcataatcgcatcttgaaatttgagtgataaaattgttactatttttaatttttctttgactaatttgtgtgtgtattaaattttaacttaaggttgttatatatattaaactatgaaaaaatatgttgcatactcaaaattttaaataagttcatgagt

SEQ ID NO: 651 - DNA, 578 bp, Glycine max
ttctacgttgtcaagcaagaaattcaagaatctgtaagtattttctattttcccaaatcacctacgtttcgttttcggttcaatttggataataaagcttacattctttatttcatagatcatgcgatgcacttagaatttctgcatgatttctctgttactggcattagtggatccgtgattttacgtgattcatcttctcaagtctgattcctgagctaaaattattaactgagatatttttgctcctaatatcttatgtaattgatctgagtatgccattttttaatgcacattttggattttggggagaacccaactgcgatctgtaattggaggataacactatgatttttggttttggggtttatgtgtaatttattggttgattaattttcattttcttctaagattgataagctacaatctacgtttcaccaatgggaaaagactgctgatgctggcgagcgatccaatctatcaaaggaagttcttggtagttgtgaaagcattgaatggcaggtataccaattgtatttctttgaaccactgacaagttggttggcctataaattttt

SEQ ID NO: 652 - DNA, 592 bp, Glycine max
ttcatatctgttggcatactctgaaaacccatcaaaatagaacattcattagttttgagataaaatcaatgtatataatgacaatcaagttaaattggagcaaatgaacaatgctttgcttcagaaaggggtataattctgacccaaataaatgatcatagtaccctacagttatgcatctctgaaaaggaaaacagaaagttaaaatcatacgagtttaaatcttctgtcttgctcttgatatcacttgacaataatactggatcaaagttcttagggtaaagatcttgctgttgcctcatctctcttagccactgctctgctttattgcactcattgatgatctgaaaaagaaagttgtcacttaaaaactgatactaagggaaacatcccacaattatatttattcacttgtttattgttgtacctgttctttatcttggggtggaagagaatctgcagacattcgatactctacaatgcaacttaacaaatctcttgtagcttgtggtcttgcttctgtgtctttataccgaaactcaattggatccaccagctgtagaagatggagattgtaagcaagaagtatggc

SEQ ID NO: 653 - DNA, 555 bp, Glycine max
atttatcaagttaattttactttgttttgactttttttgtagcgaccaatatgaatatgaattcatcgaaaacattgtgcgagaagccatcgtcgccattgtaccccgctatagcatttttctgagttttagtggaaacgatacccgctcctttacaggttttctcaacaatgcattgtgcaggagtaggtaccaaaccttcatgaatgatggggaccaaatttcacaatctactaatggagttattgaagaatcaaggctttcgatcattgtattttctgaaaactatgcacgttcctcgtcctgtcttgattttcttttgaccatccttgagtgtatgaagacgaaaaaccaactggtttgccccatcttttacaaagtgttaccgtcggatttaaggcatcaaagaaatagctatggtgaagccatgactgagcatgaaaatatgttgggtaaggactctgagatggtgaagaaatggaggtcagctttgtttgatgtcgccaacttgaaaggattttacttgaaaaccgggtacaacacatcatggtcata

SEQ ID NO: 654 - DNA, 547 bp, Glycine max
tgtttatttgaatccgttcatttaaatttgactttgttaacaaggaataacgttgtgggtacggtgtttaggctttgttaagagtttgcagttctgtttttttgttgtgtggcaattacttttgtgcagatttactttgataattattagaaagaaaatgaaaattgtgtctgaatgaactaaaaggccttgcacttttgtaggtacgaatatgaatttattgacaaaatcgtggaaatggccagtaaaatttaaaatggcttaaatcgatcaggtcctcgctcaagtgtcaactagaaggaaatatagactgaagtgccgtggaaggcagaactaatcaattcaacagattacaaatggttctatgagcagtcataagctcacagattgatactagtagttgtaatgtttacaatcggcactgaggaattgatttggaagtctgaattttacttcgaacattagcaatttctagaaaggtgaatatataagtcctgagggccatggccagaggcctgtcatcttgaaattgtgacacatggtcata

SEQ ID NO: 655 - DNA, 547 bp, Glycine max; identical to SEQ ID NO: 654

SEQ ID NO: 656 - DNA, 632 bp, Glycine max
atatttcttgtttgattacacatctctagctctttgctcatgtcacaaccataaatactgtcctcctaatcttacatcataggtattgccgaaggctttccccactcagagactccatttcctgcagaatttcctgagcaagagatttaactgaaagctccacatcctcaagcagttcgccaaggaaggggattgtttcagctatgaacactagatattcttctttcaagttctccacaaaatatttaacaattctgaggcccaatattttagctcgcaatttttcactccgtgtctgcatcaaaacctgcaaaaaaccagataaagaagccagaaagatattcagttgcttaggaatacaagtatttgcggggaacaaacatatagcattcaagagctatacatattactgaatacccaaaactataacaacaaactaatgggctaaagttcaacacataaatgaggcatggatgactacaaaggaccaaagctaacatattatgaaatggggaatgcaagagtacaggagcaaattcagatctttaaagattattgactgaaaggtaggtcaaacccgcagggatacaaagcatcaattgacattattactaaagtttgatcaaaaaatg

SEQ ID NO: 657 - DNA, 623 bp, Glycine max
cttgttgctggatcaggtaatcaaaggattgattagaagtacccaaactcattgtaaacatagttttactcagagctgtaagaactaaatttaaacttttaagttttaattgttggataagttgttagtttgtaggttataaatccatgaacttgtctttcttaaaaataaatgcatccatgaaagttctttaaactctttttaaatgatcaaggcttcaccattcccttttattttgagaataaaagaaatatttttatgtgctattatcctgaacttgttttctgctagttctaaaatttgtttttaacttcccattgctgatttgaagatctatatatattatattctgaatttgacgtcaggaatcaagcactgtcagccattacttagtctatgttttgtgagttagtccaattgctccacatcagtcacctgtagtttgtatatggagttaagatatttgtttgtcttttttttgcagtgctctcatgactctgttttatctctacaaattagcaactggcggcaaccatctccccaccaaggctgagtgatgatataatgatatatcatatatttgcttactataatacagatatgttggttgatctgcatgcctt

SEQ ID NO: 658 - DNA, 440 bp, Glycine max
  misc_feature (1)..(440): n = a, c, t or g
catgtgtatgaagtatcatggatttttcagtagaagcangcntttttaattcattattgaatggttggaactgtttaaagtttcttcattgtacatgagtaagacaacagaaatatactgcgggatgattctgggcatctgaaagttgcagactttggagttagcaagttgcttaaagttgctaaaatggtcaaagaagacaaacccgtggcaagcctggatacatcatgtaagttttcttctttagtggagccttgtaatattcgttgtcaatcatgttggtctgcgtgaaagcaatattgtgaacttttatttcatgagggctgtaatgtgcaatatgttgcatattctgccaggaaaaaaaatgctgtctactcagtgactactaaagacagttgtcagctggtggctggtgctcaattttcatggtcatagctgtt

SEQ ID NO: 659 - DNA, 618 bp, Glycine max
tttcaaacctaccacaagtaggaaattgaaagaataagtttttcacattcaggaaatttgatttgtccataggttaattgaggaatgctgggatgaaaaaccatacagaaggccaacatttaggcaaataattgggagattggaagacatatactaccatcttgctcaaaagaggggctggaaggtatcccttttttatgtgaatatttcttttatcaatttttagacatagttatgatagtataattttaacttcgcagtaatttttaatagtaaaacttaacagaatgtgaggaatttcagattcaaagactttttctgtatgattggatggatattaataatttttataccaacgtaattttactagagtaactgtttttaatccatctaaccagtagaatgccctcaaaggtgtggatattgtgcgatatagttatttttacaacgagactgtgattctttgtttcctaaggtgtaatattttcttgttatgatacacaggttaggactcctggatgcttccagaacctggaagccatatttaggggtaatcgcacaaatccaagtagccgatcatctcgctctacggccagataaatatttgcctttgccatc

SEQ ID NO: 660 - DNA, 540 bp, Glycine max
  misc_feature (1)..(540): n = a, c, t or g
actatttacnnactttttcnagggatggttatatcagttactttatttggtgttttcttatgcaccttagcatgtcttaaattctggaatttaagataacgtgttgtatgaagtactaatggttcaaacttatgtaggttatcccgcctggtatggactttagcaatgttgtgacacaagaagatggccctgaagttgacggggagctcacacagcttactcgtggtgttgatgggtcttcaacaaaggctctacctacaatctggttagaagtgagtaactaacatgtctacatatcttgaattacattgagttcttcataaatacttataggagaagaaaataagaaggtaaaatgaattaaatttctcctataagttaagatcacttttttatagaagttttcttatgaaagaaatttgattcattttgcttattgttttctttcctagttcttttataattatccaaaatcaatgactagccttgtcaagttataaccgataactttgtgcaggtgatgccatggtcatagctgtt

SEQ ID NO: 661 - DNA, 472 bp, Glycine max
cttcccacggagtacatcccatttgcatcccccttccaaatccatctatcttgttgattaagctgaatcttcaaccccttaatgtcctccataaatatagctactagttccatctccccttccaacgtcatcctctgcaactcaaaattccattcccacgattctcccacctgaacgcccatcagctgaatactgtgatgttgctgttgagatatacagtaaagtctctggtacttttccatcaaagacaaccacccatcctccctccatctaccttcccaaaactttacactcaacccacaaccaatattccacttcacaccttcaatgagccacccaccttcctcttccgatccgcacacagaatgcaagtcctgccaccaaattgactccttgtggttcctcctccccatcatctaaatttctccaactcccatactttgactccaaaacctttgcccacatggtcata

SEQ ID NO: 662 - DNA, 144 bp, Glycine max
acacgacatttgaaagggactaatgatatgtgtgtgtgagagagagaaagaactttacttgctgctgatgttgaaagcacctccttgactttcattatgggttccactgatacttgcagcaggtaaaacatgattctcggccag

SEQ ID NO: 663 - DNA, 447 bp, Glycine max
  misc_feature (1)..(447): n = a, c, t or g
agcctcgattgagactggcaccctgatatatacacacannnttccaattaattaagttgacataataaaaacatatgaaactaataaattaaggaaaaatatagaaagatgataccgtaatggattgattgtcgctgagagaaatgtcgctgagaaaatccctgtctagtgtgctagcagcaacggtgaaggaccagggtgcaacatttgtgacacttaaaggtgatggtccatcatttccagcagagcaaactacgactacgtttctggcaactgcatggaatgcccctatggacatcccatctgttaacaaagcttcggtatagggattagacgaaccgatagaggcagagatgacatcaacaccatcatgaatggcatgatcaaatgcttgtagaatatctgcttcatggcaccctcctgtgtccatggtcatagnngtttcca

SEQ ID NO: 664 - DNA, 382 bp, Glycine max
ctttccaggatcactttgttttacaatagactctccaaccaatatctacaaaaaagaaaagagtaaaataatgagtctgataaagagtaaaataatgtgaaacaactgttgattgttggtttaagtgttggaaaatttgctaaatatgatcaacatgtaacaaatgttagatagttgtcataacctgagtaatccccttatctaacgaaattcaaccgttcttgttcttttactcaaactattattaaaattgcaataaacaacatgattgcaaggacattggtggcatatgatgagtaatttggctgacaccactatattttgtataaatattttagtatctcaaaaaaatcctgttagtaccttggttgcttttaaaatt

SEQ ID NO: 665 - DNA, 460 bp, Glycine max
gctaccaacagaactcgcttcgctactggctaggctactgtcacacgcggtgcgtagtgcctactcccaagttctcaaccagctgcaccgtatttttttctttttttaattttaagaagaaatattaaggatcaatgttaataaaaattgtagaaattggtattggacatgtagtaattaaaccaagggtatgcctgtcaaacttagttaagaaaataaaatgaaaaattatttaatctaaaaatcatagaaaaatataataaaaaattatagcagcgcaatttacctttaaattaatatctttaatattatataaggataattaaggatttttttttctttaaacttatcagtccagcgagtaacaaaatagataatacaacaaatacaaatacaataaccttaataatgacaatcggcttgaaactgaggcatggtcaaggctgtttccaaattaaaa

SEQ ID NO: 666 - DNA, 579 bp, Glycine max
aatgcagcgatagtggcttccgttcttctttaccttcgctttgtagatgtaagccatgcgcttcccacagtaccacgcaacttcttccttagagtttacattctcaatctggattagggaggtgcttgggtattgatttgacttggacctgaacaacaccaccatcaatcaatatcaatatccaatacacggcacagattgaaactatttatgagaaaatcaataaacctaatactgtygtttattgtacaatctccagaaaacctttaaattaattaataataaataaaacgcacctcttgtatccaagaattgaacccctgacgtagagtctggtaaaaacaagaaaaacaacgataacgttaacaaatattcatgatatgtgcattacgcatgttgtacsaacaactgctaaaatttgtgaaaatcaaawtattattaggagacactaaacccayagattaaaagcgatgccataaacatagcaaatgaaaggaaasagtaagatcgcaaaccttacacgttctccttggcgacctttaaccattgtggcaatggtgatgcctcctgctcctcttc

SEQ ID NO: 667 - DNA, 207 bp, Glycine max
  misc_feature (1)..(207): n = a, c, t or g
tcgtaattcttttgtactgtatcaaagtattttataatttaatatctgcnacatttttatttgtagttatttatttttattgtattattaagaactagttttcttcccccattaaccccacccctttttttcttcatttaacttcattgtttttatttgcctataagctggagtttgcatcataaagcggcatggtcatanctgttt

SEQ ID NO: 668 - DNA, 539 bp, Glycine max
  misc_feature (1)..(539): n = a, c, t or g
cccaagaacgtggttggctattgaggtcatcaattttgaggttcagagcatgannnnnnntagctgggaccaaaacaggtgcagctataacaacagaacagaacaaaacataaaaaaacatttaagttaccaccaaataagcaaaaacaaagcttaaaccaaggaggaaaaacaaaacagattcagtgattttacctgtttgcttgcgagattcaggaggaggggccccatattgacgaggcaagaaaacccccgttccagcgcaaccccttttagtaacaccggatccaccttgcaacccgggtcgcgacccggatccgaaataaggcacctgttgggtattctggttcttcacttgaagagggtgccatgcagagtgaggcaaaacgtgcgtgcatttcacagcttcatagtcatacccaaactcacgcaaatcacgaaccctattctgaacttggggctggtggtgctgctgagttgcccaattanccttctcttgcctcccccaaaccaaaccacactgctgcttcancacctgc

SEQ ID NO: 669 - DNA, 5098 bp, Glycine max
atgagtggagtggggattgatattggaaatgagaactgtgtgattgctgcagtgaagcaacgtgtgattgatgttttgttgaatgatgaatccaaacgtgaaacccctggtgtggtctgctttggagagaagcaacggtttatagggtcagctggtgctgtttctgctatgatgcaccccaagtccacaatatctcaagtgaagagactaataggcaggagatttacggaccctgatgttcagaatgatttaaaactgctcccagttgaaacttcggaaggcccggatggtggcattctgattcgcttgaaatacttgaaggagattcatgcatttaccccggttcaaatagtagcaatgctctttgctcacttgaagactatagctgaaaaggattttgggaccgcagtttctgactgcgttattggggttccgtcatactttaccaacttgcagagacaagcatatctcgatgcagcagcaattgttgggttgaagcctttgcggttgatccatgattgcactgcaactggtcttagttatggagtttacaaaacagatattcccaatgcagctcatatttatgttgcatttgttgacataggtcattgtgatactcaggtctctattgcagcatttcaggctggtcaaatgaagatactttcacatgcttttgacagtagcttaggggggagagactttgatgaggttctgtttagtcattttgcagcaagatttaaggaacagtatagcattgacgtgtattctaatggcagggcatgtaggaggctgcgtgtagcatgtgagaagttgaagaaggttttgagtgcaaatgcagtggctgatctgagcattgagtgtttgatggatgaaaaagatgttaagggctttatcaagagggaagaatttgagaatttggcatcaggattactggagaaatttaatattccctgcaacaaagcattggctgatgccggcatgactgtagaaaagattaattctgttgagttagttggttcaggttcacggattccagctataactaatttattaacttctctatttaagagagaactcagccgcacgctgaatgcaagtgagtgtgtagcacgtggttgtgctctccagtgtgcaatgctcagtcctattttccgtgtcaaagaatatgaggtttgaatattgaaacaaaacattgattcttatcctatctatatgatatgtatatgtaggagagtagatttttgtgtttgtagattcttaggttagaaatgtaataattactaaatgaaccaagttgttacctaggtgctaggtttattttctgcatttagtttgtctatcttaattgaaatatatctaacttcatagatatcattgtttttttttttagaattttgcattagcatgtattgctctctataaaattaatgtaatttcttgtgtttgttcaggtccaggattctattcctttttccattggactttcatgtgatggaagtccaatttgtgaaggatcggatggtgtactcttcccaaaaggccaacccattccaagtgttaaaattctaacatttcagtgcagtaatttgctccatctggaagcattctatgctaatccagatgaattaccacctgggacatctcctaaaataagttgcttcacagtatgcctgctttagaactttactatgatgtgaaagagtttagatcatcttgtccgtgattctttgttattaatttttttaattaattattaccctctctgttcttgcttcttttgggtgcttcatgaaaggcatgtggtatagtctctatgagcttattcatcttcttcattttactgttttggtatttttaattctacagtaaaaaaatagtatatactatagggtaatcgtcatcataattgcagcttttacttttgaattgcaagtctaggactcagttatgtataaagctactacttgttatacatgtgcttgtattttatcatagtttcaaccgttgattttttattcaatggttataaatgcactttattctttagaatgtattccctcactttagaggagtcaaatccaagacctgcaatgttgtttgaagttcactgttgagtggtaaaacctcaacaaggaataaagctcaaaattgccaactcaagaatgttatgatggataagtagacacacaaggtagaattaggaatgattgcgttagaaagttaggcaccatctgttgtagaaaatatggtagaatcatgccttaagtggtttagacacgtgtgaagactttgtagaatctctaaagaaagagagtgaatcagatggaagatataattagaggtagtaagagatgaagaaaaactataagttaaatcattaagaaagattaagatttaaatggtttgtttatagagattatttatgataagacattatggtggtgtttgatccatgtagggctactgttgttgaatcttgggacaatgcaatagacacctccccctttcttgaaggagagaaagacttcattattaaatggccttgctgaccatcatttattctgatctcaaaggaagtcattgttgtaaaagtattaggtatagcaatatgagaatctgtaggtgtgcacatgcttgaacaaatcataatgttcttaggagaaggggaagcagatatggtggatctaacaccattcataaatctactgtctaagtttctcaaatggagagaaatgactatatttaatctttagtatcttcaatgacaattggctaacatttgctaatgtctattatataatataagacatctcaatattgagatactgccattccttgtgccagtgattaaaaagtgttatgtatgcttatgcctacaccttgtttttggatgcttatgcatttgtttgtcatttctatttagattgatcctttccatggatcccatggaagtaaggcaagaattaaagttcgagttcaactaaatttgcatggcattatcagtattgaatcagctacagtaagaaacctcaattttatctcttcatattgcattattagttttctgagagatctatctatgcacatggtcatttttgtctttcagttgatggaggatcatgtggatgattcagttacaacaggtgattatcattcaaattctgaagcaatgaatgttgaacctgtttctgagacagttgaaaatgtcacagaagatagtatcaacaaaaagtgtgaagctccacgccatttggtaagtactcccatgttgttctgtctctcccccctgctcacctttttttactggaagatatctcagatattagagatttctagcaaattttccttttaacacgaacaattttatggctaaattttattatctgattatttctgatactgaatctgtaccatgtctttgactgtcagtctgttgcaactgttttttataatgtctgtgatgttgtatatgtacatttttatcttgtggagattgttttgattgcagatatgattcatgttggtgttttgagaaaataaaagtgttactatcatgccttgttacaggctgatggtacaaaaaaagataaagctaacagaaggcttcatgtacctgtgagtgaaaacatttatggtggaatgaccaaggctgagatattggaagctcaagaaaaagaactccagttagctgatcaggacagaacaattgagctgaccaaagacaggaagaattcgttggagtcttatatttacgaaacgaggagtaaggtacatgttcaatatcttaatgagatgtagacatcactggcttctctgattcaattaaattgtataagcggtcacacatctcatctgctaaaatagataattgttcattgcgtgatcctttttttcttctttttcatatctttactgtgaggtgttccttcttcaaaaactagagccttaaattttgccatgtaaatatgaaagtattgaatatatcaaaatgagaaaaagctgttttatagtcattgaagaattgatttttaattttaatgactcctgtcatgactcaagtaaatgtaagggtaaaactttgtgaagctgaggatggtccgctgttatactttgtaataaaatctgcataggatataaaattaaaagctgaatccttatgccttttcttaccattgattttattaaagctgtcttcatgtctatgctctacttttcattctgtactggtatttaaatttatttgcttgtatgaatagctattcagcacatatctaagcttttcaagcgaacatgagaggaaggacatatctaggagcctgaaagcgactgaggattggctttatgatgatggtgatgacgaaactgtagatgcttattctgcaaaactagaagatctaaaacaggttacttttgtttctccaatctccatgtttcatacgccatacttcttgcttacaatctccatcttctacagctggtggatccaattgagtttcggtataaagacacagaagcaagaccacaagctacaagagatttgttaagttgcattgtagagtatcgaatgtctgcagattctcttccaccccaagataaagaacaggtacaacaataaacaagtgaataaatataattgtgggatgtttcccttagtatcagtttttaagtgacaactttctttttcagatcatcaatgagtgcaataaagcagagcagtggctaagagagatgaggcaacagcaagatctttaccctaagaactttgatccagtattattgtcaagtgatatcaagagcaagacagaagatttaaactcgtatgattttaactttctgttttccttttcagagatgcataactgtagggtactatgatcatttatttgggtcagaattatacccctttctgaagcaaagcattgttcatttgctccaatttaacttgattgtcattatatacattgattttatctcaaaactaatgaatgttctattttgatgggttttcagagtatgccaacagatattgaaatccaagggttctccatttccaaaagacaagggcgaagacaagcagaatacttctaatcatcaatga

SEQ ID NO: 670 - DNA, 2331 bp, Glycine max
atgagtggagtggggattgatattggaaatgagaactgtgtgattgctgcagtgaagcaacgtgtgattgatgttttgttgaatgatgaatccaaacgtgaaacccctggtgtggtctgctttggagagaagcaacggtttatagggtcagctggtgctgtttctgctatgatgcaccccaagtccacaatatctcaagtgaagagactaataggcaggagatttacggaccctgatgttcagaatgatttaaaactgctcccagttgaaacttcggaaggcccggatggtggcattctgattcgcttgaaatacttgaaggagattcatgcatttaccccggttcaaatagtagcaatgctctttgctcacttgaagactatagctgaaaaggattttgggaccgcagtttctgactgcgttattggggttccgtcatactttaccaacttgcagagacaagcatatctcgatgcagcagcaattgttgggttgaagcctttgcggttgatccatgattgcactgcaactggtcttagttatggagtttacaaaacagatattcccaatgcagctcatatttatgttgcatttgttgacataggtcattgtgatactcaggtctctattgcagcatttcaggctggtcaaatgaagatactttcacatgcttttgacagtagcttaggggggagagactttgatgaggttctgtttagtcattttgcagcaagatttaaggaacagtatagcattgacgtgtattctaatggcagggcatgtaggaggctgcgtgtagcatgtgagaagttgaagaaggttttgagtgcaaatgcagtggctgatctgagcattgagtgtttgatggatgaaaaagatgttaagggctttatcaagagggaagaatttgagaatttggcatcaggattactggagaaatttaatattccctgcaacaaagcattggctgatgccggcatgactgtagaaaagattaattctgttgagttagttggttcaggttcacggattccagctataactaatttattaacttctctatttaagagagaactcagccgcacgctgaatgcaagtgagtgtgtagcacgtggttgtgctctccagtgtgcaatgctcagtcctattttccgtgtcaaagaatatgaggtccaggattctattcctttttccattggactttcatgtgatggaagtccaatttgtgaaggatcggatggtgtactcttcccaaaaggccaacccattccaagtgttaaaattctaacatttcagtgcagtaatttgctccatctggaagcattctatgctaatccagatgaattaccacctgggacatctcctaaaataagttgcttcacaattgatcctttccatggatcccatggaagtaaggcaagaattaaagttcgagttcaactaaatttgcatggcattatcagtattgaatcagctacagtaagaaacctcaattttatctcttcatattgcattattagttttctgagagatctatctatgcacatggtcatttttgtctttcagttgatggaggatcatgtggatgattcagttacaacaggtgattatcattcaaattctgaagcaatgaatgctgatggtacaaaaaaagataaagctaacagaaggcttcatgtacctgtgagtgaaaacatttatggtggaatgaccaaggctgagatattggaagctcaagaaaaagaactccagttagctgatcaggacagaacaattgagctgaccaaagacaggaagaattcgttggagtcttatatttacgaaacgaggagtaagctattcagcacatatctaagcttttcaagcgaacatgagaggaaggacatatctaggagcctgaaagcgactgaggattggctttatgatgatggtgatgacgaaactgtagatgcttattctgcaaaactagaagatctaaaacagctggtggatccaattgagtttcggtataaagacacagaagcaagaccacaagctacaagagatttgttaagttgcattgtagagtatcgaatgtctgcagattctcttccaccccaagataaagaacagatcatcaatgagtgcaataaagcagagcagtggctaagagagatgaggcaacagcaagatctttaccctaagaactttgatccagtattattgtcaagtgatatcaagagcaagacagaagatttaaactcagtatgccaacagatattgaaatccaagggttctccatttccaaaagacaagggcgaagacaagcagaatacttctaatcatcaatga

SEQ ID NO: 671 - DNA, 5483 bp, Glycine max
  misc_feature (1)..(5483): n = a, c, t or g
gcactgcaaacaatttgtgccgcagcaacacccaaaccataaacctaaccccaacgtttctattcatcttcatcttcaccttcaccttcgtcttcaagcttcagcaatgagaaggccgaaatcgaaggagtttcgcaagcaacagcgagtttcagaggaggaagagataaacctcttgaattcatggatccagtttcagccaccggactccggttcgaacccaatgtcgctgccgcgtctccccaaaaactcccccgttggtcgcctcgaagataacacctactctcgctacgccggcgcgtcacggtttgatcaatttccactctcgaagaaaaccaaggacgccctaagagagtccaagttcgtggccatgaccgacatccagagagcgtctcttccccacgctctctgtggccgcgacatcctcggcgccgccaaaactggctccggtaaaaccctcgctttcattatccctgtaagtgcttcaaaaccatgagaagctgatacgtgttcgggcaaggtcattggtttaatatatagtgggtgaatagatggtatattgaattttggaatttgtgcttattgttatttgcttatggtgaattttgaatgataggtgttggaaaagttgtatagagagagatggggacctgaagatggtgttggcagcatcatcatatcgcctacaagagaattggctggccagttatttgatgtgttgaaagttgttggcaaacaccataattttagtgctggccttctcattggtggtcgaaaggacgttgacatggagaaagaacgtgtaaatgagctcaacatattgatttgcacacccggtagactgctgcaacacatggatgaaactcccaattttgattgttcacagatgcaggtcaatataacttttttctttacgtgatagattaacctcaatcggactccgaaattagagttacaattaagttgtttgttttatatcactatctgtttcctcgtgtctgtttttatttgttcttgggtatgtcaagattttccggccttaacaaccttcagaaaaatttgcttccgttcctaggtgatttaacaacagtggttgaagcagagtataggtgccctttaatttttatatgctttaggcccttgtaaagcataaaatttttattttgtcttccaaagtatgtttatttgggtctaaccagataacagatattttttttttttttgatcagcaaaagtaatatatattaataatgaagtaccagaggtactaaagatacaaaaagcaaggtatctcagtgacctggttccaaagtcagacttaaatcagtcttgatgggaaccagatactaagaacaaaatattaaaagattgctgccagtgcagctatactatcccccccccccaaaccccccactattataaaaaaggtgatgataaatttgaccaccaatgactgaagggtataaaaaagttctcctccaagttcctcaaccaaaaaaaaaaaatgtatcattaaatttgggcaatatagctgaagggtggggggacttccctgaaataggtttttggactaaatgagggtgatcggatttcaaacagggggttcaaaaaagaactaaatggaatcatttcccaactaccaaaacgaaaacaaaccttggttttctctggaactcaaacaaagtccattcaagatcttggcagactaattttggagggatcccgagtatctgagtgggcatgaaaaatctgtgacttcccccccctacccccgtggaaacaaattgtgatgattggtccccctggaaaaaaagttagaaatgtttggggagttttcnnnnnnnnnnnnnnnnnnnnnnnnnnnnnnnnnnnnnnnnnnnnnnnnnnnnnnnnnnnnnnnnnnnnnnnnnnnnnnnnnnnnnnnnnnnnnnnnnnnnccggacccctgaatgtctctctccaagattggacgccaactggcttcattatgtctatcaacgacttctgcgtctgaggggtctgaagaggtcctggttctcttaaggtacccttgaggcaggtatctctttagaggcctggataattttccccccccccccccccccccactattatacaaaagctgatgataaatttgacgaccaatgactgaagggtatagaaaagttctcctccaagttcctcagccagataacagatatgtatcattagatttggtcaatatagctgatggttgggtggacttccctgatataggttttggtactagatgaggctgatcggattctagacagtgggttcaagaaggaactaaatgcaatcatttcccaactaccaaagcgtagacaaaccttgcttttctctgcaactcaaacaaagtcaattcaagatcttgcaagactaagtttgaaggatccagagtatctgagtgtgcatgaagaatctgtgacttccactcctactctgttgaagcaaattgtgatgattgttcccctggaacaaaagttagatatgttgtggagtttcataaagacacatctacagtcgaaaacacttgtctttctttcaagctgtaagcaggtaactccacttttctgtcctgtttcaagaaattctttttcttgttgaagggaattgtatattataggcttctattacaattttactgtcatgccacttgaaaagttgcaccctttgatgcttagccaatgcatggctactggctagtcatcatttgcaagattttttgtgcaatttttgggtatgtagtttgattttatgattgaaacttgaaagttgtctcattagtttcatattcaatggccaattaaataattgttttgttgtatctgtaactgcgtgatgtagttcacatgcatagaacttctgttatggttttcagttgtgctggttatggttattgtaatgagaaattttttaaaggatttttaggatgaatttgtccataattctttcatgtaatcagggaaaatgtttaagatgtggtttttggtgcaaattccctcttttgagcttgactatcttccataatgttcacatccctgcttaataggtaaaatttgtctttgaagcatttaagaaactgcaccctggcataccattgaagtgccttcatgggaggatgaaacaggaaagaagaatggcaatatattctgagttttgtgagaagcgctctgttctcttctcaactgatgtggccgcaagaggccttgattttaataaggcagttgactgggttgttcaggtgagtctcatcctgcttgtggtttcctgtcttggagcaagttttagggctttgtggtggggtgttggaagcaaaaggcttgttttatgttcagtctctcacttctctcttgcatttgtaggtggattgtcctgaaaatgtagcttcttacatacatagagttggtcgtactgctagatataaatctgatggaaagtcagttttatttctgttgccttcagaaattcaaatgcttgaaaagttaaaagcagcaaaggttccagtgcattttaataaggtacacgttccctgcaaattaatagtatgcatgcaattccaattttcatttgaacatcaaggtgtcacttttaaatctgcttcacttcagtgttatgtttgtctgacatttgctttccatgtttttgcaattgttgattattcagccaaggcaagaactactgcaaccagtttctagtttgttggcatctttactggccaaatacccagacatgcagcatcgggctcagagggcattcatcacatatttgagatccatccatatccaaaaggataaagacatatttgatgttatgaaactacctattaacgagtattcagcatcattaggtttaccaatgacccccaaaatccgttttctaaacccgaaaattaattctaaagatgtgtcaaaatcaattttagttgaaccagaggattcagacaaggaaactatctttgaggtttcgaggaagctagacacagctgctttcaaggatgaggaaactgaaaatgatattcttcagttagcggatactgcaaatgaaggcgaagttaagtcatctgaaattgaagaaatcatgtatgttcccgtattcatttttacagtagtacagattaaaaaattaggctgctttctgataatgctgcattagtttctttatatatgattatggaaaggggctaccctagtcttctagtttcaaaattgctgaggcaaattgatacttgaatataacaccttatgaggtggctaatagaaaaagaaattcaaacttgttcttaccattcttgtggagctttgaatttcttcctccattcttgtttaccaatttggttctttcctatgcagaccagcaactcgtgtattgaagaaaaagaaactcaagattaatgtacacaggccacttgggactagggttgtatttgatgatgagggccacacacttcctccactagccaggatagcggacacacagagtggcaaagaaatgttgctcgatccaggtatgtccatacttttcaactgcaaactgaagttgatggtgaaattgttgcttgtagatgtatatacgtgtcatttctttccttgttttcatagttttgtgaaaataataaaaaatgtttaaaatgttaaaatatagctacacacttgtttaccaattagaaaacccttttgtattttctgcaatcgtcgttgaatttgagaacctgatcatggctagatctcattctcatcaaatcactgtataccattttggtcttcagagcattgaagtagttaacttacatgtatgttcttacttcataagcgtgggacatttgtacattttgccacatcatctttatgtcttgatgcagaaaaaaaagctgaatactatagaaggatgcgagatgatttgaagaaggctgacaacgaagacaagcttatagagcgtcagcggcttagagaaaaaagaatcaagcagaagatgaaatggaaggctgggaatgcggaagaggacgaccaagatgatatatctgggtcagaagtagatgagactgttgatagatggcataaaaagagtaaagtatactttgatagtgacagtgacgagggtgaaagaaatgatgttacagggaatgcaggtataactaccggtgcggttacgttggaggagcaagaagctctggctttgaaattgttaaattccatgcactcatagaatatgcgtaattcagctgtaacattttgtgacagcaaaaacgggtggaaagagagcaattcctgaaacattataggagttctgttaacaaaaaattttgatctcccaatttttttgtcatctctttcaagaaaggtagacatagaatcaatttacttaattttatttattttaactaaaaaaatgggagtaacggacatccttatgtgtaccaaacacgatgttaaatattattgagatattcatagttgtacttc

SEQ ID NO: 672 - DNA, 2232 bp, Glycine max
atgagaaggccgaaatcgaaggagtttcgcaagcaacagcgagtttcagaggaggaagagataaacctcttgaattcatggatccagtttcagccaccggactccggttcgaacccaatgtcgctgccgcgtctccccaaaaactcccccgttggtcgcctcgaagataacacctactctcgctacgccggcgcgtcacggtttgatcaatttccactctcgaagaaaaccaaggacgccctaagagagtccaagttcgtggccatgaccgacatccagagagcgtctcttccccacgctctctgtggccgcgacatcctcggcgccgccaaaactggctccggtaaaaccctcgctttcattatccctgtgttggaaaagttgtatagagagagatggggacctgaagatggtgttggcagcatcatcatatcgcctacaagagaattggctggccagttatttgatgtgttgaaagttgttggcaaacaccataattttagtgctggccttctcattggtggtcgaaaggacgttgacatggagaaagaacgtgtaaatgagctcaacatattgatttgcacacccggtagactgctgcaacacatggatgaaactcccaattttgattgttcacagatgcaggttttggtactagatgaggctgatcggattctagacagtgggttcaagaaggaactaaatgcaatcatttcccaactaccaaagcgtagacaaaccttgcttttctctgcaactcaaacaaagtcaattcaagatcttgcaagactaagtttgaaggatccagagtatctgagtgtgcatgaagaatctgtgacttccactcctactctgttgaagcaaattgtgatgattgttcccctggaacaaaagttagatatgttgtggagtttcataaagacacatctacagtcgaaaacacttgtctttctttcaagctgtaagcaggtaaaatttgtctttgaagcatttaagaaactgcaccctggcataccattgaagtgccttcatgggaggatgaaacaggaaagaagaatggcaatatattctgagttttgtgagaagcgctctgttctcttctcaactgatgtggccgcaagaggccttgattttaataaggcagttgactgggttgttcaggtggattgtcctgaaaatgtagcttcttacatacatagagttggtcgtactgctagatataaatctgatggaaagtcagttttatttctgttgccttcagaaattcaaatgcttgaaaagttaaaagcagcaaaggttccagtgcattttaataagccaaggcaagaactactgcaaccagtttctagtttgttggcatctttactggccaaatacccagacatgcagcatcgggctcagagggcattcatcacatatttgagatccatccatatccaaaaggataaagacatatttgatgttatgaaactacctattaacgagtattcagcatcattaggtttaccaatgacccccaaaatccgttttctaaacccgaaaattaattctaaagatgtgtcaaaatcaattttagttgaaccagaggattcagacaaggaaactatctttgaggtttcgaggaagctagacacagctgctttcaaggatgaggaaactgaaaatgatattcttcagttagcggatactgcaaatgaaggcgaagttaagtcatctgaaattgaagaaatcataccagcaactcgtgtattgaagaaaaagaaactcaagattaatgtacacaggccacttgggactagggttgtatttgatgatgagggccacacacttcctccactagccaggatagcggacacacagagtggcaaagaaatgttgctcgatccagaaaaaaaagctgaatactatagaaggatgcgagatgatttgaagaaggctgacaacgaagacaagcttatagagcgtcagcggcttagagaaaaaagaatcaagcagaagatgaaatggaaggctgggaatgcggaagaggacgaccaagatgatatatctgggtcagaagtagatgagactgttgatagatggcataaaaagagtaaagtatactttgatagtgacagtgacgagggtgaaagaaatgatgttacagggaatgcaggtataactaccggtgcggttacgttggaggagcaagaagctctggctttgaaattgttaaattccatgcactcatag

SEQ ID NO: 673 - DNA, 22476 bp, Glycine max
atggcgtcctccatagcctcgcaattagaagttatcagatccttcgccaaaaccgactctgaccctctcaagaggccactcactcgcccttccatcttgtatgatcccaaaaaagccgctgacatctccaccgaggctattttcaccgaagctcttcgaggtcaatcttctcatttttaatttcgctcttttcaacgtagctagtgcaactgaagcaattcagttaaccgaattaacttctcagtgattaccatggagcatatgaattatgttgctactttatattctattttcgttttgattttgttttgtttttcttatgtgatgcattatttcaggcttagagattcttattggcatggatgagcggttcaggaactataagaacgatttgtttagccacaggagtacagagttggatagagagttgatgggaatagaacagaacaatcaacttaatgtctccattgcttcatacttgaaactactttctggatattttcttcatactgccgcccttcaaacgcttgagtacttgatacgtagacacaagtgagctttcaacaatgtgttatgaattgttttcttcctaggggtgttgtgttgataatcacatttcgcctctgcctagtttacctttttttgtgatttttgatgtggtttgttttgagtttcaggattcatgtatacaacaacgaggatttgatgttgtgtgctttgccgtaccacgacgagcctgaatttgttcgaatagtacagatacttgatacaaggttagtaagatattattatgtatttttggtttggttgcggtgtagactactactggttggagaggcttctgatgtttctgttaatttttgtaaaggaatactaaatggggatttcttgatggtgtgaaagcctctggtgcacggctacctagaatggtcatagtgcagcagtgcatccgtgataagggcatattagacgccctatgcaactatgtgagtaattgttttgtgtttagttgtgaatttggaagttctctagtggaatcaaataattagatggctaggatttggttacaggcatctccgacaaaaaagtctggaccttcagtgcctgcaattcgcttttgtactgctgttttcgttgaagttttgggtactgttgtgactgttgatgatggtcttgtaaagaggatacttccttttgtgagtcttcagcctggcattaaggaggtttcagatcacaaggttagcttcctaggaaattattttccatgtattaaaatttaaaactgattatagttgggtatcatactgtaatatttttgtgattacctgctcattagtaggcaatgtaattgctttcaaatggtagactgtgtgaaataaatttgctcttttgctctacaatatccactaatgcaatactattcatcacaaataggaatagtggtgcataattttttatgtggtacaagtttgttcactgttgctatgtttgttgtgttaaactagtttctactttctgtataacttgtttccataaatgtagaatctgcttgactagatcatgttataatctatgttttgttcaagcaattgattgctttattttgcatctgatcctttgctttttaaaacccttgaactctagaatagtaacatcatacaagaatatagcagctgaccctgcctagttggagtaagattggatattgttgttttgttatagctttagtattcttttttatttcttgggcaagtagattttttatttgtgaaaaatgagttggctttaatctttccagtcatgaattttcgttttttcatggttaggctgtgatacagattgagtgctaaatagttttcaatatcccttattttttcattaaaatcagaaataaaagtaattcaccaatataaaagagccctccaatttctctccatatttgtgattgtgttggagactcccttaaaataaacccgcactgagcaccaaacaaagaccataaccatctgtttctatagcacttaagttgagggaaatatatgtcagcacaatcataaaatatgattatatgtctgggtgaccttactttagtgcttatttgatctgttgaaattatggggttttaggtatagagggaggtaaagaagagaatagaagctttgaatgatattttactgattattacgatgaattgcgatgtcttggatggtatattcatgaaatctgaagtcctaacccttatttatattattcatagagcaatcctgagagataatgaaagtataggaagactaatcctaaaacataatctaagacactctaacatatgataaaatattttcacatattctaacaatatatgtatacttgtgtatttgagctatgtttcttggcaccctctcctgcttatttttttgtcaaattgtcctgatttacaattagcagctggaagctcactttcttgtgcttttttttttttggttttctattttgcaggctggttctctgatgatcattggtttgcttggaaacaaaactgcattagctcctaaacttttgaatagtttgatacgtttggttgctgaggttgctcgtcaggaggctacagagttgacagatctccattggtttcgattgtcccttattaccttaattagtcttgttcaggtactagagtaatcctgtgtgcttgtgtatggtttaaacggaggcattaatccttttttttggggggtggggaggggggtaaatggtatttcatccaatttcctttcattgtgcaatatctatttctgaatctggctatatttttattttaatttgttctgttggaattttcttagtctcaaaatgttgaaatactcccattgaaggctttggagatattaaaggaaataaggtagtcttcctcaaactgctcaacatatgcataatcactgtgctttgactgtcttttctttatttatatttatgatatattaaatcccttttcatatagggacctggcaggggttttattagaattatctaaggagttcaatattgaaaagtttctccttgtgcttttggactccctgattgactgcaggtgtgcttcctatgattgtctttcaggagatatatgctttaagtcatatcttatagaagcttgtgttttgtgctgattataacaataacacatttgcagttcttctgatgaatactgtcagcggactttgctatccttaatagaaaaagtccccataaatggtcttgtttatcatgtggtcaccaagatcctttcaacttgtgtgaaattatcacaaaaagttagcgactcaacttcttccatgtcaggtgtgtattctgattttgaattgtagaaagctgatcactatcctgtaccccaaattatatatcctggtgtgcttcataaggttgatctaataattcgtaccaagagtgaatcaatgaatttctaaagaaaataatatttaatgaaaatctcatttggtgattgagaaatcacatctaaacttctgtaaaaaaattgtttgaatacctgtgtgaaaatgtgcttctgaattctgaaagcaatgaccatggatgcattttaagttactgggaaatttcattcaccatgaagtttgatcttactttgtgtttgtataagcttattttggaggcaaagaaatttttttggcagcttatctggaaattatttcccccgacacaacttttcaaacatgcaatagatacatgatattaaaagtggtctacttagcagtgatttgttttctgtatcaatattacttaagtaataaaatgtttgtccagtctgtataaatagtaagaactagagtttgaaacaccagaataaaggcattgcattataccgaatgctgacccactccatttctacattatgaaaagcatttctcaattaagagccaaactcttggatcacactggttacaatgccttgttttcaaagaatcttactccattctttaacattttaaccctgtattgaaactgggaaaagaaaattggaatttgttaaagtctaaagggtgccttcaggaagggaagttttatttgttaagaaactacatactctttttttcaattgtaaataaatagatttatgaagaaacccagagaccatgaaaggtacatatgaagacaggaaattgcatatactactgtcctattcattaatgctgctaacaatccttgttgataccaactctgttttggctaagtttgagtgtggaacagctttgaagcagttgaatatgtgatttaaaacaaatttggagtgttgtaaacaaatgcactaatgaactagatatcttcaaattgtgtatctcactatatggcttatgatttatctatgtgtatcatgcatgcatgttatgtcttcaatagtcagtgtactttgttttacttgcttcagcttggaaattcaaatttctttttaagaagttttgttgatttctgtgtaaattattattgtcaggttttgctcctgaataattttgttttcttttcttatggtgtttttttttaatcatatagcttcatatggtatgcctttatcttttttactagaaatttacaactagtcagttatcttttgttgcctagcttattattctcataatgttggtttgccaaatgttgattagctaggtgggcaaaaaagattctgtttgttttcaatacaaaatacccttctgaattacgagatgccactcatcatttccttcaggtatgctgatgaattgtctgcttttttgttgctgtcatgcattgtcagatagtatataatggcttgaactttgaacatgttcaacaggataataaagcacgttctaagaaagatgattcattgtataaggttttatgtaagatgttggatgggaatatggattcttcacttaatatttcagactcaaatatttggttgggcctgtatcatccaaaggtattaaccattgacctattcttgattattaggtgtatgtaaatgtaaaagtgtgtattctcctgttctacagtgatcatttttttttaattgtaagagcttcatgatttatatttgatatggtggtctaggctgatgttcgatgtgctacgctgcttgatttaaataattccattatcctcaaaaccaaggcagttgcttcagaggtatatatgctctgctaatcttcccgtcctcccaaaacctcatgtttccattaatttgtattttttgtttatgacaatgtttgaagaacatccttgatgtgctccttttggttggaaaaaagttgaaacttcttgcttatgtgatttatttcctttatatacctgtcctcccaaactgcatgtttgcttcaatttgtatttttcatttatgacactggttgaagaacagccttgatgtttctctttttgggtggcagaactattaaatttttgcttgatgtgttttctgttttgcacactcacacccacacacaatgggggattgttcaatataagttacacccactcttacatcattcagtaaccttttattggataattttatctcgttacccattgttggattaaaagttcctatcatgtctacaaaattttagattaattcaaatttttttgatacatcattcatttcatcaaaattaatgtcatatatacttctgaaatatataaaaataaaacccatccgattttcttcttattgttgttcatattttacaagatttggcataaataattttggtaatatataattataattcaattgttggcaaaaattacatttcataataattgaagagtaagtgtgatttacaacggtgtaaattaattcctctttaggtgtgtgtaatttctgatggtggtggtatattacttctctttgattttatattttttaggaaatggttgcattacaaaattttgctgttaaactagttttatttggaaatatttttttgatacatttaagttctactttgaatgatttgaactgagttgcatttctgatctaatttgttaaggccactgattttacacattgttggtgagggagggtataattgagttttgttagaaaacttcatttgaaagagtaggtgtacaaagtgggaggagtatatatccctcaaaagccacctcaacttcatttgaactgagccaagtaataaaggcttagcaaaaagtgaagaccacagaactcaagattaaagccaatgtctttacagcactgtcaaaactcaaaagtgaacccctctgtaaactgagccttgacccacgatgaactcaagggcacaaatttgtccaaaagaaagtgtggtggtggaaaatgctataaaaagttattgtatcatgcttcattgtcaaacacaaacaccaatttctagtaagaagtactcagtaccaatggtaccattatttagtacttggtatgctataatcaattatatttataagccataaattaattgattatcatcgtggtttatgctgtttttatgcgaaattgagttgatttcatgttgacttagggaaatctatataatatggttaaagttcttgctagaatgtgttaatactgttttgccatattcaaagtcttcaacctttaactaaccccaaaacacatcttttttatcagaatcttataaacatccaagaggacatattaagacagcttgatgataaagatctaacagttgttcaagcagctttacatgttgatggcttgccaaatgtaatagattcttctaagcttcttgatgcactacagaatgtgctaaaaagatgcactgacaaactgctgtcaggtaattggtggtatattaaaataattaggtagatttcatcttcattgtttctgcatgttgtattgaagcactacataccatgcatcaatttatccataaactgggacaaggaatttgttctctgaatgcattcttgatggatgatgattgatgactgttagggggtggtgtggttatgtgcagaatacagatgtggtcttataaatgtctaagcttccttaatgtttttccaatggttcaaaatatgcttatgcttattcttctgtgtattttgggattgatttgctctattgaacttatattctttcccttttctttttcaagggtgtctgattgtccatttttatgtttattttatcaaaatatgcttttactttatgttgactagatacatacaagcatataaccttcagttcatacacttattccagttgtgctgctgttactggagtatatttgtcctcattaagttattgctagttgtttcctgtctttgtgaagttaacttattccagttctgttgtaaccatggataaggatgaatttggcttcctagagatgtttgtgtttagatattctttaaaccaatggtctttgcttggttccttactaatgattcattcaaggatgatgcatccatcccaagattggatgggaggattacataattgaataaaaaaattattctcttattcactgcatgtattattcgcccattatcttcttgtaggttcagctgataactatagtctaaatggtgaagttgctgtcacttgtctaaagaatgccatctcctactttagtgatcatgctgattacttgaagaatgttgctgctatgatttttccattactccttgttctacctcaggtagtggctaacttcatatttaatatttgtttttctgatagaaaattaatatattttgatcttgtacttatttaatagcttttagatttccccttctctgggtaattatcaaataaccacttattttgccatgtgcagacacagagcttgaatttaaaggctctgggacttgtcaacaaaataaactggccactttatcagaatattgttgtgtcttcttttggaaaaggggtaaatatctactttggaattagtttgctataaatttaatttacacttacaatatgaagaaatttaattctgttgctcaacaaggcaagtttgtcaaactcaggatcctataaagaatttgtcaaggtgaactgaagatatgaatcaagcattaggtcctgtctcctttggaaaaccaaaactttgcaaattgaaatacagatattatggtgggaataacccaattggaccatgactagtctagtacatgaacatgatatgttactacttactagtagtacttgtagtgtgggttttctaaaaagatatttttggtttcatcatatttctaagttgttaatcagtaatcacaaccactcatgaatatgtttgtcagatgaaattgtcaatcatcttttactttagtgactcttgaagtaaaattgcagacattgatacctggaagtttatcttcaattaacttgaagactattgataacatggctaagaatttcatggtccatcccaaagagcatattgcttggtttgttgaaagctgcagtgatttggagttgtcaaagacactcttcttttttgttcttttgcagtctcttttgataaaaccaaaaggtttgttttccccttctctttttgaattccattttaatatttttcagaaatagttaataatcttatattgtataatgactaaaaaaaagtaatgtttgaacaaataagctagaaataaatgtttgaagcatatcttatacatcccctagttgtacttttctcttctctattagatttcttcgccaaaaaatttcaaaagaggggattaaggaatgctaaatattgattttttccttttgatcaaagatgaagacatttgtgctctatttgaatgtgtatttcctattctaaaggctgagtgggaaacatcagtgacagctggtgatgtctcattggatgaggtacaaaggatttactagcatatttgtgcttttatttcattatttgcttacttttttgtaatgagaagctaattttttacttctgttctgattgttgggaattcgggttgttttgcagttcaagtctgaagtgttagactgggattgcagtgcattctttaatgatcttttgtatgtcaagctgagccatctaaatgtgaaggttatgatttgcatattttggagactagcacaactaatatcagtactaccttccgacattctgcttgttagtaattcctttactatttgtaatcctgttttcaattgtcttatgaacttgctttccttcttggaatttgttgttgttagactctcaccttcaacattggttggatattaaccttttacaaaatgcagcatgatgatgataagtgggtcagcaagataagggatctgtttgtattttttgcctcatctaaattgaagcatgcattccacgaacacctccattacttagcagcacagtgcagaatatcacctccccgcctcttatccaagtttttcacagaggaaggtgctatacacttattcccttttgtttgatttttctcatatcacctccagtttgtttcgtccatctatgcaaatgcaattaagttctatttttttttttcggggggggggggggggggaggggagagggagagggagttgatcgaaatcgtggttgtttgaattgatatttttaacattttatgaatcagaagtcagataaaattcaattggcatatttgatattttttggttgaatctttcgttctgcaggtgttcctgctgcagtccaggttgaaagtcttcaatgctatgcatttctttgtagcctgtcacaagataaatggcaaattgaacttttagctgaatttccttctgttcttgttccattggcgggtgataatcaggtatgatcctttgttagcgttactctctgaccttgtgtgtattttttctcattttctgcaaactggcaatttataattgttgacaaatggttatcctctgttactttttttgctgttttctttttgagaaaatgtcatcggctcaaatgatttgtttgcattttttgaattttcttccagactataagggttgctgccatgaactgtatcgattcattgcgtacattgtggtgtcatgttgagcgttctggcaagaaaaatggtactttattgtcagaataatttgatgtagctctcaatgcctaattaattttaccttggaactttataagtttctaaattggtaagaacaggtaacaatgcaacgtggatccattttctgggtgatgttttggcgttgatggatcagcagaaaacattcatattgtccgacaagaaatttcttccttcattgtttgcatctgctttgagctcatcctgtccaaacatcttagagcctcgaaatatcttggtacctcaaaatatagaaaaaaggtatttatgatgttactatgacaattatcatttcattggcaccaatattcttaccttagaactatttgttatattcattgccttagctgctgcttatcaaatatgaccatgctctcttgttctgttgttggaattagctagatcttcttaaatgtggagagcagctttccccttttctttttaaaatctaaatgatacaatgttcgacaactgacagaaaattttcctttgtcatgggaaataattgttctgttgctgttcattgtccccattgtcaaaactcaaagttcataaggattggagggatggcatgacacaaataaagtcatatagggaaggggaaagtaaattaagggtgggaggagaaatggaaatttaggtagatggcatagagggagaactaggatattcattcaatgttaaatttgaatatatatatatatatatatatacacatatatacacagctgagaattaaaatggtactgaaccaatgcataaactgtaggatggaaccttaacttgacagttgaatgatcctatttttattcaaaatcctaacttagtacaaatgctaataaattatattgcttataaattttgtaattatgggttttcacttaagagctgttttgatctattgtgttgttctagaatgattgcttatcttcttcttgtccttatttatttcctctagatgaactcttcgataaacttgaaataagaaactctgataaattccaaactaagcaatatgacactttagtttggagtattttattaaattgcatccttaggatttagtgtgcacgtgcatgtgtctctgttatatgaccaattgacattaagtgtcaaattttatacaacaccaaatcctattccttccttctcctttaatctaaaaggcccggattgattcactgaaccaatcacttgatcaactgttttctcttctcgctacttgtacctggcctttgtatttttattgcttttgattcttttttccttgctgagtgctgacgagattgtgataagagttattggcaagtgtttccttttggactataaagatatagccatgaatggagtcattgcaaaaatactaattgtaaatatactctcttcctaagaaagttcaagcaggcaggcaaagttactttatgtaccatatataaagacaagtttctagtagagactctctccaatcaaagaagcctacataattaaatgacaatatgacattataaaccagaatctcataagcatcctgaagtgatccttctaggtccaccgtgaaagctgcgtttgtgaagaagagaattggtcacctaattgatttagtgaatcaatattaggatttagattaaaggataatgaaaggtaggatttggtgttaatataaaatttgacacatgtacagtcacatatagactttaacattgttttattttctttacatataagatttagtgtttttgtttgtttaatgttcatgttgtgcggcttaccattttagtggagtttaagctgctgttttgtgttatcgagattgattgtagggatagaataggtttgggaatattctgttgttattggttctgatacttatgctcattgtttgatgcatatatctgtgagtcttatcttgtaactttctctgtcttacttttaccttttcattttgcttgttagtttctgtttttattttttataagaatgttccttatcttcattcatgaaaaatgttgatttgtgctaatttctgagattctttattccactttgttcccaaacatatcttttcaggtttgaccagcctacaaaaataaaaattcttggcttcattttgggttccactcttaaattctctaactatgggaaggtttgacgttttaatgcccttctatgttgctatttatatttttagttgtggagatagagatacagatcaaggtttcatatgttcagttccagattatttgtgtattatatattgtgttatgtgtgggtttttgtgctatgccgggactttaaggaagtaacttatttgttgatgttggttgcagctaatgattttatccttattcaaaggaattgggaatgcccttatgcacgttccagaagttgggccattgttgtcctctttactggagcagtactatgatgagctcaaaaagtcttgcccaaaattgtcaaacactgaaactcagataatgtgccttttgctggaggtatgtgtattgtatattttagttttagcttatggaatctttattctgaggttgggtgtgaacttgttcctcttcatgcgtagagctgtattatgtcatctccctctggtggaaatgatcttcaacatcttttactgaaagctttgcgggtgagatattaagatgtatgttttatttatgtcctgttttgttattttgaatttactgacttcattcttgggacctttcagttgggcagcatgacattggatgaccctgcctgtgtgaagccttgtatcactgtcttgaacaaacttaacaatcaattctatatggagttgaagaatgaagtaaaggtcttattggcagtatatctatttattttcagagtttgtagttgtcattcatgataattgatgagtagagctaatgatgtagttaatgagtttatgataatctgtttcattgtgtaaatgaaaaaattatcaccaatgtagcttctactgtgacctaaactaatagttttttcttatgcctgtcaggagcatttattttgtgagctcgtgtttttgtggcataatgataatcatgatgtacaacgtgcaactaaagaggcattaatgtgcatagatgtgagttccttgctcttgatcaaatatcatgtgttgtgtgtgcgatttctttagtggttacttgcaaagaacttaatcttttggtattattcaatgtggacctttggggttttcatccctttaagaagggtgtttatttatttttttctttttctgaggggtggggttccccacctagtgggataaggcgttgttgttgttgttgttgttgttgtctgaggggtggggttgtggatcttggatcctttccccctttaccgtggttaatgagctccgtagtttgagctttgtgctctctgattctggacgaatcatggcctctctctttctatggcagtatttccatctattcccaatcagaccgcgatggtttcttgctgttgaacttggcagccctgtgttctatcctccattatctgctgtctctgtgtcgctgttctgttccttgctttttgtttgatagcacatttcactgtgaaacaggtgtttcatcattatttgctgggtgtttagcttcaaattcatcaattgattgtaaattttttcaaatgataagataaatgttttttttttaaaatccttaaacagttaatatggtagtgacctgaggagaaatttaaaaaatttaaatcactgaccatagccttttggaccaactggttgttttgcactatcaatgttatttgatgtttattttgcattatgatcttcaatgtccgacctcaccttgtggggtaagattttgttgttgtttcttttaaacgtagtgggaggtttttccaacttgttattccacggaaggaaaaaaagaaatgaaattcagaataattggtggatatattggaattgcagattagtttctcaactgttggccacatgcttgatcttatacttgcacaaaagagttgtataagtagttcagcagaagaaaagatggcgaagaaacaaaaattcataggacatcaagaagcaggatatcctcctaatgacatatgcagaagagttaatccagtctacatccttagttcccttcttgatgttttgctactgaagaaggacataacaaacaggtgacttggttacttctgaatctgaacattacattatgggtactactaagatgagtagttaaagcatttaattgtgctaatttctcagtttgattgttgcaggcatttacttttagggcccttatttaagcttcttagcaaggtattttcagaagaatgggtgaatggtgccttttccccggtgataaggttaagccaaccttcaagtccttcggaagctaacaattacacagtatatcatatacaacagactctgttgataatcctggaggatataattatttctcttaaaagcatggctccgctaaatgtatgcttcctagttgtgaagctgaaaaatttattacgatagaaatattattttgacttccttttcactattttagctatttccttatattattaagttttgccattgttgataggaaaaaatgataaatgaaattaacattaagctattgatagagtgcgcccggaattccacaggttcagtcacctgcaaccatgtattttctgtactttctgctgttaccagagtctttgcaggagaagttttggagcatatgcttgatattctagaagttattggacaagcagctgtcacacaggtttgttaatatagggtttccctgtactgaacttagggcattctttgggtagaatagcttattagatcctttgctccccttttgggaatgatgttatttggctagaatagcttattacatccttttcttatgtttccgtgcttgttggaaagttccacaactcctacctcgattactagggtgtgcggtttttatacttgttggacaacctcacttaatgccaattagttttaagatgaaatctaacatggtttcaaagcctacagtaatctctgtcgtttctgtgtttcctttgtgcatcacttggtcagcaggcatctgtggaaggggagggggtttggaaattcctgcatcacctacctcaattactgggattgttggatgaccttacttattaactgttgcaacttgtttaagagaaattcttcacaattcaatttagtagggactaataatccagtgtaggaactgtggtgtcatcatttctcttttttgtgtgcctgtagattgacagtcattcgaagcatgtttttgaggatcttatatctgcaattgttccgtgttggctggctcagacagatgatgtggagaaattactgaaggtttgtttttcacagaaatgatcttctgctgcttgatacatttagaatctctttgcagatcagccttctaatatgttttttttcctccagattttcatggatatattgcctgaaattgttgagcacagaaggctgtcatttgtgttatatctattaaggtattgttctacttctacatcatgatcctgctattgatactttagccattggtttttggcctgtgtcttataatgatggctgttttgcagaactttgggtgagggtaaaagcttagcctcattgcttatcctacttttccgttcattaatttcaaggaaagctgcctgtttcctttatgttgagacacatgctttaacattttatactgaggagtgggaatataaatttgcagtgcaaatttgtgaacaatatacaagtacgatttggcttccttctttagtcatgctgcttgaacagaggggaaatagtgatgttgaccaggcactgtttctggaattgtttattgtaatgcaattttctttgcaaaagttgcaagatccagaatttgtgtttaagttgaaatcaggagaagataccacagtcattcaggtataaatccacatcagatgcatgctagatacttgtatgctttttaatgtctttattcagttctataaggcaaaatctagatgtaacttatattatgatttttatgaatagcttctatttttgcctgacccatgcccaataatggctaacagatacatacagtatgttgttgagatgttgatatctcttaaatcataaatttggggatactatgttgacacccactggctgcaatgtggcgtcaccacccatgctgcctgtgtgcaggctaagggacatggtggaaagctttgataccaattgataagaactttgggagaacaacaccacaaaagctagccgttatacttagttagagagcccaaggccttataaaccttggtagaattgcatacttctaatgtgcaacttgattcccatagcatgcaattggatcctatcattaacatatatcttccctgatttattaattgaaggaggtacatgtggggtaaagaaaacagtattggacggggtgtcaatgtaatttgcctgacaaaatagtatgatacacatgatgaagttaaatttccatcaatcagaaattgtgattttaaggtgagggacagatcttacgatgatattgaagcagaagcaaacttcatcattatgaactgaaatattcattctttgtagaagaatttatatcatatttgttttccttttctttgtaggtttcatgctgagatgtttttggttttagtgtgagtgcaatggcattgatgttacatacttatatttgtgttaatattttgatctttgaataagcctataaagacttgttttttttagatgaacatatttatcagaaattggacttagggccctaattcaacctgacaaaactggcttgtaaggtgaggactgcccaagcttcataagttctatttaaccacatatctagttgacgtgggactaaatcaccacccttgaggttgcaattaaggcaacccccaaagaggtgtgactggaatttagacaactatcctacaatattcattatcaaaacatgaactggaatattctttgtagaatatatgtcatattttgttttttctttgtaggtttaatgttgagatgctgtttttggtttcctattgtgatagcaatggcattagtgttgtgtgcttttatatatatatatatatattagaaaatgttctaatctttgaataagcctatattctcttgtttatttagatgaacatattcataatcaaaataaatgtgatcgcttcttcaatatttcagagggcgttgggtgagcttatggagcatgttgttttactcttgcaacttgtagatgcatggaaaaagcaactgaatttccctgtaattctgaggagagagttgaaggaaactatgcgtgcggttgtaaggaatctaacaacagtcatgatacctgccggatactttaagagcataattaaattgcttcaccatgcagacaagaatgttggaaaaaaggtatggtttttaatgaagttacaaaatatgagattttattaggatcttgcattattttgatagaagggtaaagtggtaaaccacaattaatcggtgtctttatctgcttcgtagtattctattaaacatcctgattttcaagatgtttacttaatttgatgggtatacaaagtggtcatttattcttttttcatatgatgattgggttttattcacatatgttatgaacaccgttggttctatatatactgtaaattgtttagttggtattgaccacacatcttggtaaattatttatttgccttttaatatgtgtgcatgagctcatgataagaagccaaaaatactaagggggtgatcacttgcgcttttattttctgttttcactttttaattacaaaaatacaaccttgttttcaatttgtttcctgtttttatttaattgtacaggaaacgctaaaccccccccccccccccccccctccatttcatgtatttgacaataggaaacaaatagaaagcaaggtgacatttttgcaactaaagaaaacagacaatagaagtgcaagtaaacgccccaagtttttaatagaaaagaaagtattgatatatcgaaaaacatgaaaatcttccaatgtttgcacaccatgagcacagaatagaaatccacattttttttgtggtgtgaaagcaagacagtgagaactgtgatttgatatttgtatttcttgtgctgcaggctcttgggctgttatgtgaggcttcgagaaatcataaaaatgtcagcttaaagcttaaagacaataaaggttcaaggtcaactccaagttttcttttgcttcatatgaacgaaacttctcaagaatcacttaataaattgtgtttagaaattatgcgagtacttgatgattcatcgaatacctccttgaaagtggcagcagtttcagcattagaagttctggctgaaagatttccttcgaataattccatctttagtttgtgccttggatctgttacaagacatattgcatctcataacttggctgtgacttctagctgcctcaaaacaactgctgccctgatcaatgttctaggtccaaaatcactggcagaacttcccaagattatggacaatgtgatgaagtcatctcgtcgagtattggctgatatgaaacccgaaaccattgatgttttatcagcctcaaatgaatcccatttttatgttctcatcactttggaggcagttgtggacaagcttggtggatttttaaatccgtatcttacaaatatcatggagcttctggtgctttatcctgaatatgtttcaggagtggatgtaaaggtggagtctagagctcatggaatacgaaagcttcttgctgaaaaaattcctgtaagacttgttacaatgtagcattgtgtaaatgtggtatgaaatgaaatacccatttttttttctttaccaaacactttatttttttacaggttcgacttgccctgccacctttgttaaaattatacccagcttccattgaggctggggataaaagcttaacaattgtatttgatatgttgggaaccataattggtacaatggacagatcatctattgtggcattccatggaaagatatttgacctttgtttggttgctcttgatctgcgccgtcaaagtcctccttcagttcaaaacattgatgtagtggaaaaaggtgtgcttaacgcaatgactgttctaaccttaaaacttactgagagcatgttcaagcctcttctcataaagagtattgagtgggcagaatctgaagtggatgaaactgcatccagcggaagcattgatagggccatatcattctatggcatggtaaataagcttacagagagccatcggtaagtcagtatttagttagcttgttattgtttgatttagaaaatgttctttgaaataagcatgctttgaatttagtcaaacaacactttatttgggtttgtaaatattttgggtatattttgtattctcagaagaacagtttagctttttgtttgtattaaattatgtacgtgtatattaatgtagatacaaaaattgtgttttgaaccactgtaaatatgtcaaccacttatgacagttgagacttgtacaatttggtcacagtatttaaatcagaagttagttttcaatgtgatttccttaattatttatgatgtttacaccgataaacataagaatataatcagttgttatgttgttaccttgtttacccaaaataatgatcaaatcacagcggtttaagatggtgctatatccttatttgtaggtcattgtttgttccttacttcaaacacttgcttggtagttgtgttcatcatcttagcgatggtggagatgtgaaagtgtctagagtgaatcggaagaaaaaggccaggattctagatgatggcaatataaaagaaataggcagtgtgtctatcaagggctggcatctcagggctctagtcctgtcatccttacataagtgtttcttgtacgacactgggaccttgaagtttcttgactgctcaaatttccaggcaagtgaattcttttacataataagaactctcatttgtttcatctatttgtatccgataccaaaacttttaaatacttcactgatacgtgtctgtgaagtatcaagcctttttaaaggtgtgaaaatctaatatagtttacatattgagacatagaagcatgtataaacattgaagcattgtcccttgatggaccaaaatgcaaactactatcctctttatggatgatctcaataaagtaatgagattgatactatttctattggtatattaataggacatgatttacgatgatttatacttttttaaataatgtgcaggaagtatgcttttaatttgaatttacagaattttttttacatatctagatttatattttatacctatcctatacatttttagaataattgcatagtcatatcagatacttttcatatctgatatatgtatcacatgggcatcagtatctatttttaccatttggagtggttatgaaaaaaattctctagaaggctttttttccacctagagtggaattttttaaaggttatgcattaattgggaatttttccattccatttaaaaatagtttgtatgttttctcattcccttttctcattccattgaggaataaaatattcctaaatctttcagcttccttcagtaatatagttgcttgttatattccctcactgactgttatatcatgcttgctgcagatgttgttgagacctattgtttcacaacttgtcgtagatccaccagttctgttgaatgacagcatgaatatactaagtgtgaaggaagttgatgacctactggttgtgtgcatcggtcaaatggcagtgactgctggatctgaccttttgtggaaacctttgaatcatgaggtgaattttatgatttctattcttttctactgttcgttaatgattgggcaagtaatttgatactgacatactggtaagtggtaacttactggcttcactatcttgtttttcattgagtgaaaaatgcatatgatcaggtgtcctcgggaaacactgttataaatatggctggttctactattctccctattagtttgggtgcatggatgccccaagacattttaacaatagattaagaatgtgtctaacaatagaagtaattaactctctaaaggccataataaaagtgtaaattactgatatggcccccaaaaacttttaactcaatgaatgcactcctcttacatgtaaacatttagtcagtagttgtggtgcagcagcaagccaacaaggtggacgggagcaactgggctcctagcaatggcagcaggttctaatgtggagtttctaacattagtcattcaaactagaaaaatgagcaaatccttaccaaaaccttcctttgctagaccttcatttttggacttgctaacaactacctatcaacgtcaccctaggcatagtaaaatcatgtcctatttgggaaaacttctcaacaagaacttctaagagaagaaaataagtaggtaaaatggattgagtttcgtctgtaagttaaaattaacgtgtgcacaagttagaataagtttttagagaagctaaatgagaacttctataaaagttgattttaacttatgagagaagcttaattcatttaacactctttttttccttattctgtaagtgcttattgaatagtttatccgaacagggtttcagtcatgttagagtttaccttttctgctatgtttatcgggctttataaggtttaattgtaaatagactgtagcttttatgccattttttgatcaaactttagtaataatgtcaattgatgctttgtatccctgcggttttgacctacccttcagtcaataatctttaaagatctgaatttgctcctgtactcttgcatccccatttcataatatgttagctttggtcctttgtagtcatccatgcctcatttatgtgttgaactttagcccattagtttgttgttatagttttgggtattcagtaatatgaatagctcttgaatgctatatgtttgttccccgcaaatacttgtattcctaagcaactgaatatctttctggcttctttatctggttttttgcaggttttgatgcagacacggagtgaaaaattgcgagctaaaatattgggcctcaggattgttaaatattttgtggagaacttgaaagaagaatatctagtgttcatagctgaaacaatccccttccttggcgaactgcttgaggatgtggagctttcagttaaatctcttgctcaggaaattctgcaggaaatggagtctctgagtggggaaagccttcggcaatacctatga

SEQ ID NO: 674 - DNA, 5415 bp, Glycine max
atggcgtcctccatagcctcgcaattagaagttatcagatccttcgccaaaaccgactctgaccctctcaagaggccactcactcgcccttccatcttgtatgatcccaaaaaagccgctgacatctccaccgaggctattttcaccgaagctcttcgaggcttagagattcttattggcatggatgagcggttcaggaactataagaacgatttgtttagccacaggagtacagagttggatagagagttgatgggaatagaacagaacaatcaacttaatgtctccattgcttcatacttgaaactactttctggatattttcttcatactgccgcccttcaaacgcttgagtacttgatacgtagacacaagattcatgtatacaacaacgaggatttgatgttgtgtgctttgccgtaccacgacgagcctgaatttgttcgaatagtacagatacttgatacaaggaatactaaatggggatttcttgatggtgtgaaagcctctggtgcacggctacctagaatggtcatagtgcagcagtgcatccgtgataagggcatattagacgccctatgcaactatgcatctccgacaaaaaagtctggaccttcagtgcctgcaattcgcttttgtactgctgttttcgttgaagttttgggtactgttgtgactgttgatgatggtcttgtaaagaggatacttccttttgtgagtcttcagcctggcattaaggaggtttcagatcacaaggctggttctctgatgatcattggtttgcttggaaacaaaactgcattagctcctaaacttttgaatagtttgatacgtttggttgctgaggttgctcgtcaggaggctacagagttgacagatctccattggtttcgattgtcccttattaccttaattagtcttgttcagtctcaaaatgttgaaatactcccattgaaggctttggagatattaaaggaaataagttcttctgatgaatactgtcagcggactttgctatccttaatagaaaaagtccccataaatggtcttgtttatcatgtggtcaccaagatcctttcaacttgtgtgaaattatcacaaaaagttagcgactcaacttcttccatgtcagctaggtgggcaaaaaagattctgtttgttttcaatacaaaatacccttctgaattacgagatgccactcatcatttccttcaggataataaagcacgttctaagaaagatgattcattgtataaggttttatgtaagatgttggatgggaatatggattcttcacttaatatttcagactcaaatatttggttgggcctgtatcatccaaaggctgatgttcgatgtgctacgctgcttgatttaaataattccattatcctcaaaaccaaggcagttgcttcagagaatcttataaacatccaagaggacatattaagacagcttgatgataaagatctaacagttgttcaagcagctttacatgttgatggcttgccaaatgtaatagattcttctaagcttcttgatgcactacagaatgtgctaaaaagatgcactgacaaactgctgtcaggttcagctgataactatagtctaaatggtgaagttgctgtcacttgtctaaagaatgccatctcctactttagtgatcatgctgattacttgaagaatgttgctgctatgatttttccattactccttgttctacctcagacacagagcttgaatttaaaggctctgggacttgtcaacaaaataaactggccactttatcagaatattgttgtgtcttcttttggaaaagggaaatttaattctgttgctcaacaaggcaatacttgtagtgtgggttttctaaaaagatatttttggtttcatcatatttctaagttgttaatcatgactcttgaagtaaaattgcagacattgatacctggaagtttatcttcaattaacttgaagactattgataacatggctaagaatttcatggtccatcccaaagagcatattgcttgcatatcttatacatcccctagttatgaagacatttgtgctctatttgaatgtactataagggttgctgccatgaactgtatcgattcattgcgtacattgtggtgtcatgttgagcgttctggcaagaaaaatgcagaaaacattcatattgtccgacaagaaatttcttccttcattgtttgcatctgctttgagctcatcctgtccaaacatcttagagcctcgaaatatcttgtggagtttaagctgctgttttgtgttatcgagattgattgtagggatagaataggtttgggaatattctgttgttattggtttgaccagcctacaaaaataaaaattcttggcttcattttgggttccactcttaaattctctaactatgggaagctaatgattttatccttattcaaaggaattgggaatgcccttatgcacgttccagaagttgggccattgttgtcctctttactggagcagtactatgatgagctcaaaaagtcttgcccaaaattgtcaaacactgaaactcagataatgtgccttttgctggagagctgtattatgtcatctccctctgatgtatgttttatttatgtcctgttttgttattttgaatttactgacttcattcttgggacctttcagttgggcagcatgacattggatgaccctgcctgtgtgaagccttgtatcactgtcttgaacaaacttaacaatcaattctatatggagttgaagaatgaaattagtttctcaactgttggccacatgcttgatcttatacttgcacaaaagagttgtataagtagttcagcagaagaaaagatggcgaagaaacaaaaattcataggacatcaagaagcaggatatcctcctaatgacatatgcagaagagttaatccagtctacatccttagttcccttcttgatgttttgctactgaagaaggacataacaaacaggcatttacttttagggcccttatttaagcttcttagcaaggtattttcagaagaatgggtgaatggtgccttttccccggtgataaggttaagccaaccttcaagtccttcggaagctaacaattacacagtatatcatatacaacagactctgttgataatcctggaggatataattatttctcttaaaagcatggctccgctaaatgaaaaaatgataaatgaaattaacattaagctattgatagagtgcgcccggaattccacaggttcagtcacctgcaaccatgtattttctgtactttctgctgttaccagagtctttgcaggagaagttttggagcatatgcttgatattctagaagttattggacaagcagctgtcacacagattgacagtcattcgaagcatgtttttgaggatcttatatctgcaattgttccgtgttggctggctcagacagatgatgtggagaaattactgaagattttcatggatatattgcctgaaattgttgagcacagaaggctgtcatttgtgttatatctattaaggaaacaaatagaaagcaaggtgacatttttgcaactaaagaaaacagacaatagaagtgcaagtaaacgccccaagtttttaatagaaaagaaagctcttgggctgttatgtgaggcttcgagaaatcataaaaatgtcagcttaaagcttaaagacaataaaggttcaaggtcaactccaagttttcttttgcttcatatgaacgaaacttctcaagaatcacttaataaattgtgtttagaaattatgcgagtacttgatgattcatcgaatacctccttgaaagtggcagcagtttcagcattagaagttctggctgaaagatttccttcgaataattccatctttagtttgtgccttggatctgttacaagacatattgcatctcataacttggctgtgacttctagctgcctcaaaacaactgctgccctgatcaatgttctaggtccaaaatcactggcagaacttcccaagattatggacaatgtgatgaagtcatctcgtcgagtattggctgatatgaaacccgaaaccattgatgttttatcagcctcaaatgaatcccatttttatgttctcatcactttggaggcagttgtggacaagcttggtggatttttaaatccgtatcttacaaatatcatggagcttctggtgctttatcctgaatatgtttcaggagtggatgtaaaggtggagtctagagctcatggaatacgaaagcttcttgctgaaaaaattcctgttcgacttgccctgccacctttgttaaaattatacccagcttccattgaggctggggataaaagcttaacaattgtatttgatatgttgggaaccataattggtacaatggacagatcatctattgtggcattccatggaaagatatttgacctttgtttggttgctcttgatctgcgccgtcaaagtcctccttcagttcaaaacattgatgtagtggaaaaaggtgtgcttaacgcaatgactgttctaaccttaaaacttactgagagcatgttcaagcctcttctcataaagagtattgagtgggcagaatctgaagtggatgaaactgcatccagcggaagcattgatagggccatatcattctatggcatggtaaataagcttacagagagccatcggtcattgtttgttccttacttcaaacacttgcttggtagttgtgttcatcatcttagcgatggtggagatgtgaaagtgtctagagtgaatcggaagaaaaaggccaggattctagatgatggcaatataaaagaaataggcagtgtgtctatcaagggctggcatctcagggctctagtcctgtcatccttacataagtgtttcttgtacgacactgggaccttgaagtttcttgactgctcaaatttccaggcaagttatgcattaattgggaatttttccattccatttaaaaatagtttgtatatgttgttgagacctattgtttcacaacttgtcgtagatccaccagttctgttgaatgacagcatgaatatactaagtgtgaaggaagttgatgacctactggttgtgtgcatcggtcaaatggcagtgactgctggatctgaccttttgtggaaacctttgaatcatgaggttttgatgcagacacggagtgaaaaattgcgagctaaaatattgggcctcaggattgttaaatattttgtggagaacttgaaagaagaatatctagtgttcatagctgaaacaatccccttccttggcgaactgcttgaggatgtggagctttcagttaaatctcttgctcaggaaattctgcaggaaatggagtctctgagtggggaaagccttcggcaatacctatga

SEQ ID NO: 675 - DNA, 1152 bp, Glycine max
ggccaatctaaaagacccatttgcccttcttgttccaaacccagccgaacgtgtctctgctctcgaatcctcacaccgggtctccaaaattctgtgcatgtaaccattctacagcactcgctagagcgtaagcatcccctcaattctaccagaatcgctatattgggcctcaagaatctcaccgttgcaactgtttctgatgttaatttcgaagcccggttcctgattcggttgttggatccgaattaccattcgggtcatgctggaaacgagccaactgcgttgttttctcgtcagtgttgggaaattggagacacccagaaattgctttctgagaaagattctaacttgattgatactgatagtgctggaaaatgtggtttgagaaatgatgttggagatgttctggattctgcttctaatgcagaagttgtgaaacaagtgagtatcagtgatggtgcagtgatggacgatgaagttgagaaaaatgcaattagtccaaagtgtgatttagctagaggtgtacatgaagagagtggagaactagctgttactgttaccattggcaaatatggtgccattagctctttgtctcatatttggatgactcaagcacaatgtcaatcccccgagttaagctttgacaatattttggcgtacccggaagcttgtgaagcactctcaaaagggtttttggtgaagaagtttcaaaggaagcaactgaatagggatgaagaattggaagaatgtgaagaatttgagcttgaggttcgtcctggatcggtactactatttccctctgaaatggctgttgatgttagtgacctggatgctataggttttgaggtgaagaacttgattgttctggatggaacatgggctaaggcaaaaagaatttatagtgaaaatccttggttgaacattttgccacacgtgaagttggaagtgaacaagacaagcttatatagtgatgtgagacatcagcctaaagctggttatttgtccaccattgagagcattgtatttgccttgaaggcagttggggagttgaatcatgagggtttggaaggtctcttggatacttttgagtccatggttggagatcagaggcgctgtaaagaggagagactgagcaaacacttttcctgttga

SEQ ID NO: 676 - DNA, 1029 bp, Glycine max
ggccaatctaaaagacccatttgcccttcttgttccaaacccagccgaacgtgtctctgctctcgaatcctcacaccgggtctccaaaattctgtgcatgtaaccattctacagcactcgctagagcgtaagcatcccctcaattctaccagaatcgctatattgggcctcaagaatctcaccgttgcaactgtttctgatgttaatttcgaagcccggttcctgattcggttgttggatccgaattaccattcgggtcatgctggaaacgagccaactgcgttgttttctcattctaacttgattgatactgatagtgctggaaaatgtggtttgagaaatgatgttggagatgttctggattctgcttctaatgcagaagttgtgaaacaagtgagtatcagtgatgagagtggagaactagctgttactgttaccattggcaaatatggtgccattagctctttgtctcatatttggatgactcaagcacaatgtcaatcccccgagttaagctttgacaatattttggcgtacccggaagcttgtgaagcactctcaaaagggtttttggtgaagaagtttcaaaggaagcaactgaatagggatgaagaattggaagaatgtgaagaatttgagcttgaggttcgtcctggatcggtactactatttccctctgaaatggctgttgatgttagtgacctggatgctataggttttgaggtgaagaacttgattgttctggatggaacatgggctaaggcaaaaagaatttatagtgaaaatccttggttgaacattttgccacacgtgaagttggaagtgaacaagacaagcttatatagtgatgtgagacatcagcctaaagctggttatttgtccaccattgagagcattgtatttgccttgaaggcagttggggagttgaatcatgagggtttggaaggtctcttggatacttttgagtccatggttggagatcagaggcgctgtaaagaggagagactgagcaaacacttttcctgttga

SEQ ID NO: 677 - DNA, 5379 bp, Glycine max
atggcgaagatgaagatagcgtggcttctgctgctcctcctggtatcagtgtgcgtaacggcctctcaagtttgggccctgaaatcgccgtttcacccgcgagacgtgcttcctctgctgccgagacagctgtcgtggcccatcctcaatcgcctccacagcgcggtggatctcctccccgtcttcgtcggcgccgccttttcgccggtcgacaatctcaagtggaaaggcgcctgcttctacgagaacaaagcctggatggtgtttcacaacaagagtggcactcaatatggcggtggaacccttcacatcaaggtcgcttccttctcaagtgttggaatggaaatctaggtcacttctttttgttgaatttttttttcaaattttatgataagtcattcttgttctaatgaacttttatttaatactaatcggtgaaggactacatcaactcgtttcatgaaatcttcatactgagtggttaacaaaaattggtcatattcatgagatacttcgtagttttttttttctttaaaaaaaaaattgcttagggagtaggtgtcattaagacttaaagagtgtgtttttaatattggaatgcatagattatgttatgtgattgagttgtaatttggtggattttggttggacgtgttgtcatttgaaagcgtattacattattagaggagactaagttaagtggatttaatgtcgctcagtattttgcatgtcattagaataatgaaactcttactccccaaatgggtagaaataagagagagataaagagaaaaaataaataaagagggagtaactgatagatgtggcagatgatgttatggaaaatgaaaagagaaatgggatagatcatagaagtgagatggaggaaaagttgggtgtatgtttagtattttcctattagtctatgcagttctataattgtattttttttatccctcactctctctctatgtatgtatggatttgggattcaacggaaactgattgattattatctatgtgctgatctaggttagcaatgctcacagttggacgtgcatggatctttatatttttgccagcccttatcgtgtgacatgggattattatttcctggcccgggagcatacgcttgagatcaaagagtgggaagggaaagctgagtatgagtatgtaagtgaccatctttcttctgtacactgtcactgagtagagtttgttgaaacttgaaacacacatttttgttttggagatccttaccctctttgcaatcaggtaaaaaaccatgggttatcaattttcctcttgcaagctgggatgttggggacccttgaagcactttgggaggtcttccctctatttacaaatactggatggggggagaactccaacattaaatttttggaaaaacatatgggagcttcttttgaagtgcgccctcagccatttgttacaaatgtcagtgttgatgacattcattctggagatttccttgccgtttcgaaaattcgaggtcggtggggtgcttttgagactctagagaagtgggttagtggagcttatgctggccacactgctgtttgcctaagggactccagtgggaagctttgggttggagagtcaggacatgaaaatgaaaaggtaaaatatttaagttgcattatatctatcggttctgtgcaagatttattatatttcatagcaccattgtcagtatcatacgattcacgatacaaaggcatacgattcgattcgagcagttggtgactcaaacccttgagtgaaacattttgtgcttgaatcgccccatgaatagcaggaatcacataggaattgtagattgcgcatgaatcatttgattttgatgcaagcggccgcacaccaaagtggttcgggttatgcaggacccggttttgaactttgaagaaccctaaaattgtttttctttccctgaaaaattagtgaaaagagagggaattggccaattctttccctctaatcaatcgcagggcagcccattgtctccttttcatgttttctactcattcttcttgtcttttgctcttctttacctttcccaatctaccctacatgcaagcttggtggtccactcttatttagggtggtcatactgctgagtttgagcagctactggttttttgtccttatggctgttaagaattggtgattttttttttctttgaagcttatgtcactttgtaagccattttgacaagtcttacatcagctaaagataaagtcaagttagagtatataagtgaggggtaacctttacctcttgagctagtttttgaggttgaattaggcctaaactcgcattctaaagatcctaagatggtatcagagcatatccaatattaattcaaagggtcaccttgttgggcgtgagagggtgtattgaaaaaaacccaagtctcacatcggctaaagagttacagtatataagtgagggataatcctcacccattgagttaacttttgaggttaagttaggcctgaattcacatcctaaagattctaagagtatgttttagcttttgatatgtttccttatgttaaaatgctcctatatttatattttgtttaatgaatttgtgcttttatgtcttttttagttgtatgtgttatgttttattattaatcatacagttcaatttgccatctggaaaataggccttcctgtttacgatttgaatctcaatttaactaccatgtttcatagtcatttcttgataatttcattaatatttatattttcttcccttaaaaaaactaacatttctagaatcctatgcgatgtttaggttttgatataatttatgaagaattgttttaagttcctgaagttaaccatgttgtcatcagaatagcaagattatactccagtttcagtttgaaattgtgatcgaaaattagtgcatggtgattaccaagttaatatatatagattttcttttatgacaaataattcatcacggttgtttgattgtttgagcaatgatggtaaaagtatagtccatagtggtttgtcaactctgtagcggcatttggagttaagttgctagcattttatttcctgcctcaccttttgtttgcagggagaagatataatagctgtgataccatgggaagagtggtgggactttgaactgaataaagatgattccaatccccatattgcgctgcttccattgcaccctgatttgcgtgccaggtttaatgagactgctgcatgggagtatgcactgagcatggcaggaaaaccatatggttaccataacatgatcttcagttggatagacactttaaatggaaactatccaccccccttggatgctaatgtggtattaatttaatcagttgttctgcttaaatttcaattcatttgttacattagattcaactatcttgagtttttgcactattatgccatgcttgagcattttttgcctacaatttcctgacaattgtatgaaatatttcaaacagagaattaaataaaccatggctttgatcttgcaagaactcaatgagctttctacttaagttctttgaattaccgtaccataagctggtttatgtagagttatctgtctgccacccagatagaccattgctattgaagaaaatgttctttcacataaaaaataaaagtgatgaatgtggtatcaatttttgatagtttgttttctctatcttctgccctttctgtctttttttttatgttttagccacatgctacatagcttaatgttttatgaatgagcatttactttgttgctctgcaggttgcttgcgttatgacaatttggagtcaacttcaacctgaatatgcagcaaatatgtggaatgaagccttgaacaaacgacttggaactaaagtatgctgcaatcttgtttcttgctccaatacacacacccacacttgaaaaaggagaaataattttatttcttgatcagaaaatgtattataattaatactgaaatctcctaaatgtggaaactaggaatttaaataatacacacagctgcgcaaataattcacatgttacaaatatataacaatgtcgtcaatgtgagactacaacactctcccacaagttggtgaatgaatgtctacacacacacacatatatgtgatactaaacatttttgcttatgctagtaaactgaatcaatgtcttcaattgtctagcataagtcataagatgcttgtgatgtgatctactgcatagattagtaagcaatcagcaattgcaaagactgggcatccctttcttttataactgccttttgataatatagaattccacattagtgaaaaaaagtgaaccatgtggctcttatgtgtttctacagggacttgatcttccagaagttttagtagaagttgaaaagcgtggatcatcttttgatgaactactaacgattcctgaacaggattattggacctacagtgatgggaagtcgacttcgtgcattgcttttatacttgagatgtacaaggaggcagggctgtttgatccaatttctagttccgttcaagtgacagagtttacggtgagtttgctgggaagtttggtcttttgaattgcttgcaatattatagtaacttttgaatttcattctacacaatttatacaaatgattgagcatatataatttcttatcatggttgtatagatttctaacaaaatcctttacaaagtgaaatcaggttgttgagcaggattgatatcagttcatcatatatattattttagtgtttctagaagtcaaaaacactttatagtagtttcttgaccaggcgcatatagacttatttttgtgcaataagtgcagataaaagatgcttacattctcaatttttttgagaacaattctagtcgcttgccaaaatggtgcaatgatggagacacggtgaagcttccttattgtcaaattaaaggcaagtatagaatggaattacctggatacaacaccatgcaaccataccctcatatgaatgaaaagtgtccatctcttcctccaaagtactccagagcccagaattgctagcagtcttcaattttttcctccaatcggagggctgattgcgtgtgagtgtgtgaccagattttttggtcttctagctttggattgcttaggagatgccaaatgaattattgtttgtatccatttaatttaaaaagaaattcaaacaattcgatatcgtgtatatatttattattacaaacttgaacttatattagacattcatgtaatttggattatctatgtagccagattcaacagtgtaaatataagggacttgaatatatgtacatcatgcaaaattaactttaataagtgccgtgt

SEQ ID NO: 678 - DNA, 1578 bp, Glycine max
atggcgaagatgaagatagcgtggcttctgctgctcctcctggtatcagtgtgcgtaacggcctctcaagtttgggccctgaaatcgccgtttcacccgcgagacgtgcttcctctgctgccgagacagctgtcgtggcccatcctcaatcgcctccacagcgcggtggatctcctccccgtcttcgtcggcgccgccttttcgccggtcgacaatctcaagtggaaaggcgcctgcttctacgagaacaaagcctggatggtgtttcacaacaagagtggcactcaatatggcggtggaacccttcacatcaaggttagcaatgctcacagttggacgtgcatggatctttatatttttgccagcccttatcgtgtgacatgggattattatttcctggcccgggagcatacgcttgagatcaaagagtgggaagggaaagctgagtatgagtatgtaaaaaaccatgggttatcaattttcctcttgcaagctgggatgttggggacccttgaagcactttgggaggtcttccctctatttacaaatactggatggggggagaactccaacattaaatttttggaaaaacatatgggagcttcttttgaagtgcgccctcagccatttgttacaaatgtcagtgttgatgacattcattctggagatttccttgccgtttcgaaaattcgaggtcggtggggtgcttttgagactctagagaagtgggttagtggagcttatgctggccacactgctgtttgcctaagggactccagtgggaagctttgggttggagagtcaggacatgaaaatgaaaagggagaagatataatagctgtgataccatgggaagagtggtgggactttgaactgaataaagatgattccaatccccatattgcgctgcttccattgcaccctgatttgcgtgccaggtttaatgagactgctgcatgggagtatgcactgagcatggcaggaaaaccatatggttaccataacatgatcttcagttggatagacactttaaatggaaactatccaccccccttggatgctaatgtggttgcttgcgttatgacaatttggagtcaacttcaacctgaatatgcagcaaatatgtggaatgaagccttgaacaaacgacttggaactaaaggacttgatcttccagaagttttagtagaagttgaaaagcgtggatcatcttttgatgaactactaacgattcctgaacaggattattggacctacagtgatgggaagtcgacttcgtgcattgcttttatacttgagatgtacaaggaggcagggctgtttgatccaatttctagttccgttcaagtgacagagtttacgataaaagatgcttacattctcaatttttttgagaacaattctagtcgcttgccaaaatggtgcaatgatggagacacggtgaagcttccttattgtcaaattaaaggcaagtatagaatggaattacctggatacaacaccatgcaaccataccctcatatgaatgaaaagtgtccatctcttcctccaaagtactccagagcccagaattgctag

SEQ ID NO: 679 - DNA, 208 bp, Glycine max
atggaagtgagactcagtgctatcaaggccttgctttccaattgtaacatgctggagagtttgagttttaaaaggtgttggaactcagacaagtttgacctaggtgaagaaaaacacatgggtctgacacagctcgtcctagaccaatgcggctttgattttgattatttcaaagtcaatgcaccaaatctcaaaattttcaagtatt

SEQ ID NO: 680 - DNA, 208 bp, Glycine max; identical to SEQ ID NO: 679

SEQ ID NO: 681 - DNA, 777 bp, Glycine max
  misc_feature (1)..(777): n = a, c, t or g
atgagggtggcggaggaggagaaagcagtgttggaacaagtgttcgggtcgtcatcatcagaagaatgtgattctgatggatacagcgagagcgagagcgagtgggagcccatctcagaagtgaatggcctatggctgtgccctcacttcctctctccacgccgccagtctcacatactctcctccatccaagccgacaattggttcccctccccttccatcaaccaggccatgcgcttcggcctacaacacctcccttcttgggccacccctctggcccactccattcgccgctccgtccaagcccaggcccaagcccaaacccacccaccgcccttccccctccacctcctccacagagaacctctcttcgaccagatgatcgccaacgtctaccagcccggcgaaggaatctgcgcccacgtcgacctcctccgcttcgacgacggcatcgccatcctctctttagaatcttcctgcgtcatgcacttcactcccctctctggttccctttccgttcccgttttgctcacccctggttccttgattctcatgtccggagaagcacgctaccgttggaaacacgaaattaatcgcgcaccggagtttcagatatggcgcgctcaaccattgactcaatccaaacgcacctctatcaccctcaggaaactttgcccctcctctccctgabgcnnnrttccacactcaaccctttctttctgttataataatttcaatgttctattattcagcattcaaaacaaatttcaatgttca

SEQ ID NO: 682 - DNA, 690 bp, Glycine max
atgagggtggcggaggaggagaaagcagtgttggaacaagtgttcgggtcgtcatcatcagaagaatgtgattctgatggatacagcgagagcgagagcgagtgggagcccatctcagaagtgaatggcctatggctgtgccctcacttcctctctccacgccgccagtctcacatactctcctccatccaagccgacaattggttcccctccccttccatcaaccaggccatgcgcttcggcctacaacacctcccttcttgggccacccctctggcccactccattcgccgctccgtccaagcccaggcccaagcccaaacccacccaccgcccttccccctccacctcctccacagagaacctctcttcgaccagatgatcgccaacgtctaccagcccggcgaaggaatctgcgcccacgtcgacctcctccgcttcgacgacggcatcgccatcctctctttagaatcttcctgcgtcatgcacttcactcccctctctggttccctttccgttcccgttttgctcacccctggttccttgattctcatgtccggagaagcacgctaccgttggaaacacgaaattaatcgcgcaccggagtttcagatatggcgcgctcaaccattgactcaatccaaacgcacctctatcaccctcaggaaactttgcccctcctctccctga

SEQ ID NO: 683 - DNA, 3494 bp, Glycine max
atggctttcaaccatcttcgaaacctcaatcgcatctccatccaccgcattctccaccatcgttttcagcctctccttaacgctactactaggttcttcatcgatgctgctgcttcttcaatgtctcaaccgcagcccaaacaacaaccctcggccccatcatcatccttgaagcacaatgagctcgccaagttcgccgccatcgccgatacctggtcagctttcgaaacgaaagagagaatctgttcaatgaatttattgttataaacaccacaattaaattgcacattttttttcattgggtgaatttgttcactatttgttgaagttgttgctgcagtatgtgtgttagtttgagaatatggatgacatgtatttgccctttccttggtgtgaataggtgggattctgaaggcccctttaagccattgcatgtgatgaatccaactagacttgctttcatccgttctgcactttgtcggcatttcaagtaagcctgctctttcatttagtccttgttacctccatttttgagtctcgggtgtttattcttgaaactactttgctagaatgtgcaaggctttgtgctatgttataatttgattcctttttttttttttttttttttttgcttggaattagtggatttaaaacataatctggttgtactgtgccagattccaagccactatcatttatgcagtcttattaaaccaataacatttgtgtttgctacacacacatggtaggaatttggtttaataccccttgaattaaatataatcgtataaggatgtgtaagaagatgactctgatgaagtatctgttaataaaaagtgttaactgaattattttttgacacaaaccaaatgaagaaacaagaagaaaaacaataggagaaatggtattacggttgacaatgggtttatatttttgttttgtctctaacggggttctattcaactaataattagatttcacccttgtctcaggaaggacccttatagtgctaaaccccttgaaggacttaaaattgttgatgtaggttgtggaggtggaattctttctgaggtatatcttttcttcttttttcttgtgatgtttgggaaagaccttttcctttttatcttctggcctatgataaacctatagtttggtataataagttcagagatgactatatttgttgactatattacttgttatcataatcctcatgggaatctgtagcattatgatggatgcggagctgactatatttgttaggttgaatacttgaattgtggaaatctgaattatttctttggtgcatattgtcctccctctcacttatagagtattaagtttgttattgttttttattgcaaatttgtgctcttttttgttgttattttataatttatagccatgcttctctttttgttcttcagccactagctcgattgggagctactgtgacgggtgttgatgctgtagagaagaatatcaagattgctcaacttcatgctgtatgcttattctatatttgaatatttgaaatttgtcagtcttgtcctacaaattgattagattgctgtattctgtatattggaggaagcagttgccaacattagtaaattattttcactatttgctggacaacttattatctcctgtcaacagggtttagatccagcaacttcatctattgagttctgttgcacgacagctggtatatttacaaatcttgaagcattcttttacacctttgttttacatccttccttgacgtgcatgctttaagtctgttaacatttggacactaatgctgaaatgccctacccaaatgaatgctaatacagtttatttcacaatcttgataagaagcacaagtctgactggcataatttccttttatctaattttctgagtggtttttccatggattcagacctttgctggatagtttagagtttcattacgagattatgatgcattggaaacttcaatattttcactttctgttggcttgtgatttcttgtttttcttacagcttgtagttaataaccattttatgttatttatcttcacttagagtcttagaatgtatctttacctgtagaaaagtcaattttttttgctttgatcttcccactagggtcttacattgaagaaagtttttactctatcccttaatgtttctcattatacaaggtatcatacttggacatgctaaatcgctcaagtgggtgaataagttttaagctaaaagaattgttacattacatatacttaacacttcatcgttcatcctctctatagttggaagaattatagttttcattggcgatatccatccaatttctttgctaggaattaggtagcatgtttgtaaaaaattgaacgctctttgtacatcagtacatgcatgatggcttcaataatcgtcgtaaaagtaaaagttgcttgcattcatctagttcatttcgaattgtccttatgttttcaggtattatgcactgtattttacacctcaccaacaatttttaaattgattgatcagagaagctagttgaagaaggaagaacattcgatgcagttatggccttggaggtactttctctttcgtgccccttacctctttttggtcgtgtgcttgcagattggagtgcataaatgggtgttgagataaaaacttcgtaccccattgcccggaggctcttcgctatgcgaaggtatgggggagggatgttgtacgcagtcttacccttgcatatgcaaagaggctgtttccggattcgaacccatgaccaacaagtcaccaaggcacaactttacggctgcaccagggctcgccctcataaatgggtgttgagataaaaaaaaaaaaaaaaagatatgacataacatgtagcgtaaaatctttgatagtagtacagtactcaatggagttgaaggatacattttgccttgcattggttcatttgctttgaatttttttgcaggtgattgaacacgtggcagatcctgctgagttctgcaaatctctgtcagcactaacagttccagatggagccactgtgatatccacaatcaatcgatccatgagagcctacacaactgccattgttgctgcagaatacattctccgctgggtattcattcttctcaactcaactccattcaacactttttccatcctacattcaatcgacacattatacatatattgaactccacagcttccgagaggcacacatcaatggtccagttttctcactccagaggaactcgtcctcatcctccaacgtgctggtatcaatgtacgtacgcaaaacgcattcataatttccactgttagggattaatcatcgcattcacatgaaacttaattctggttgcattgcacacgcaggtggaggagatggccggaatcatgtataacccagtgacaggagggtggtctttatcagacgatatcagcgtaaatttcatcgcgttcggtaccaaataa

SEQ ID NO: 684 - DNA, 891 bp, Glycine max
atggctttcaaccatcttcgaaacctcaatcgcatctccatccaccgcattctccaccatcgttttcagcctctccttaacgctactactaggttcttcatcgatgctgctgcttcttcaatgtctcaaccgcagcccaaacaacaaccctcggccccatcatcatccttgaagcacaatgagctcgccaagttcgccgccatcgccgatacctggtgggattctgaaggcccctttaagccattgcatgtgatgaatccaactagacttgctttcatccgttctgcactttgtcggcatttcaagaaggacccttatagtgctaaaccccttgaaggacttaaaattgttgatgtaggttgtggaggtggaattctttctgagccactagctcgattgggagctactgtgacgggtgttgatgctgtagagaagaatatcaagattgctcaacttcatgctggtttagatccagcaacttcatctattgagttctgttgcacgacagctgagaagctagttgaagaaggaagaacattcgatgcagttatggccttggaggtgattgaacacgtggcagatcctgctgagttctgcaaatctctgtcagcactaacagttccagatggagccactgtgatatccacaatcaatcgatccatgagagcctacacaactgccattgttgctgcagaatacattctccgctggcttccgagaggcacacatcaatggtccagttttctcactccagaggaactcgtcctcatcctccaacgtgctggtatcaatgtggaggagatggccggaatcatgtataacccagtgacaggagggtggtctttatcagacgatatcagcgtaaatttcatcgcgttcggtaccaaataa

SEQ ID NO: 685 - DNA, 5363 bp, Glycine max
ggaaatttaaaacctttatactgtaattaaaggcagcagcaacacagcctaacagcatgaactatgttaatagcactgaaatctaataggtttagatgccaacaatttatatcataaccggcaagcacaaccctcatgactcattcaataagctgttctcatcaaactagtagcctagcacctcttaatttccttcaacctataaaagctaaataatcaggattacaattagtgtatggagaaacacatgattgcataaatgtgaatgaacatacaatttgtttattgagtaattagcgtgatcagatttcctgatccagaaagctacctgtcttatttcctatatatattggtgttttccaagaatgaactacctgttatgatattaacatgaccagtttcaactaccaccttgtctctccttacatatcattgtgtagtaatatagacaaaaaccagttttaacttttaagcacaacggagtgcttacacccttattcattagactcaatgattttctgtatacatgtatctacagaggttttctcatgcaaaaaagttgacaggatcacatcagccactgtacggaaattgggacaagaagaacatcccttactatcatgacaagtacaaaatattttgaagagtttatcttcgaccaattaatgaattccaatttacagatgattcctctcttggtttcgttttcgtttttgttctcaaagagatattccttactcattaattcagcaaaatccacacacacacacacacacatatatatataaatgtcttccttgaaggctccataatccttagcatgaggaactgaaactcagaagtgttcagttcttgagctactacctcacaataaaagaaataatgctcaaacaacgaggttaatgtttctttcacattaattggaagccaatgcttttgcagtttcaaaaccattcagttagcaaattaaagaaacccaacaaagtttattttatatctttggtcccacagaaacttggtataaacaaatagcattcagtaactaattaagtttccccaattaatagttctcatgctttcgtttcattttgctatatccagggatttaatgtcatcaatcatcaataactagctctctggaagatcctcttacacctaaaactcaaacaaatagttcccattagtatcttcaagtctctaaaatgttgtttgtaatttaaaagcagactctaacatcaaggtggaattccaccttattcgagcaccccgagacacaagtgatttgcttttcatctttgtacaataagtcaaatttttaatctcattatatttctatagtcaaattaacttaatagtcaccccctccttttgtcaatactcaagtacgtatttaacaaattcatcttaatcctcttgtggactgtgtatttctttatctatgaaggggaaaatgatacacatatataattaaattcagattttgcatccacgtccagtccaacaatcagtagtaagacttacattttgcaaggtaatttacatataagagataataagccttttcttatgtttttattcatgaaaattttaatactgttcccttgctggttgtcattgtaaatcctggatgaaacattaaataaaagctgaacaacactcatgttgtatctaaatctttctgctttcacacaaacctaaagagtagttcttccatgattgctatcttactcaatgcctctcttgcttaattgttcattcaattatcaaagcaaacagcaaccatctccttcatcttttctttctggttggaatgacaacatggtttacttatgaattatgatccccaaagagcttcagaaaaaatctagcattgcctcaataaataaatggcaatcatttttcaattttttgttcctatatatctgaagcaaacttaatctcatgcatttcatttgtacgtgacttatatttatatttccccattgagaaatgtctgtcactaacagactcttttgaatatactctttattatggattaaaatttactaaaaatcacaaaactttgctcatcgatctggcttcaatcataattttgtagttttcattaattaaccatcgtagaggtgttagaaagtgtattgctaacactcctctaatatcccccatttgaatgcataaaactatttcagtaaaatattccatactcatgatggaggtctagttggaatttcttgttaccttcttgctgtatatattgtgttgcagttgtttgatcctcggactcggttgtggaggtttcaattaacagtgacttgggaaccttcaattctcttggagggtgcttggactgtagattctgtttcaacaaccttcaaaggttgaatatcaatctcctccaacttcttcatcagccaggatcagcaaacaggaaatgatttcaacaataagatgcacttgaatctgatcctcaatctgttacaggaaaaaaaaacatcattggaagggaaagaaaaaaaaatcaactgaaaaatatccaaaatcagattcaaattttttttttaaaaaaaaaaacaaatttcaacacaatcacctgacacctgctttgctcattttgggaatgaaaatcagcaaaccactgtgttacttcctactcctcaaacaaaaaaaatttaaaaaaaaatatttaagctcttccagaaaaagtgccgagctaaaacatcaattccatatatatttttattaccaagtccatactccatcccaatattaaattatatttcattttatttactgaaatgatcccttgattaaggattggggaaggtatcataataaaatgagtaacaagaatatatatcatgaatcatgatatcagtaagtaagctatatatgctaaagaaatagaaatatataaaatagaaaatgcatggaagactttccaaactagaataaaggctaaattgaggaaattatatgttataatgattataggcacataccagatgagtgaggaggattcgggagtgtagagggaaacagagaggtaagaactgaaaattgcatttgggtgttagaattggaagctaggcatgatgcaaacgaaaccaaactaccaaattaagtgtgagattagattagattagagagaaagagaataatctgtgcactacacgacacgaataccattatcattagtgggtgggtcctaccttcttgtcgttttctttgacctcatgcatctatgatgttttcagtcacttcgtgtatcattatgccagattgccacgcccaactatatttttcacagtaatattatcaaataaagattattgaatttaatttttatataaaaaattacatcattcatcaattagaaaattattgtaaatataacttttgagatacttactaaaaaattaacaatttatcatatgagttaatttattgttgttgaatactaatacacaagttctttatactattaattcttaaaacttatgtatgattgagtgttcacaaatcatgaaatattttggatttattatggtttataaattataactttatgtaataataatagtttacttttagatcacattataattgatatttaaagttatatttactatcacccaactataattttatctaacatatttatcttgaaaaaaaaaactctatctgcctgaattaaaactgagagtgtttggctgcatcctatgatctggtttaaacatgctaaagataaagaccgtgtgttggagaagttggtaatttgcggtgcacgttactttaaagtttaaacaaacaggtcttaaagtcaaaatgatgcgcgctgcaaggaactgtgtgactgtgtattagtgggggcgcctcatattctaagcatcgccacacacgacaccacgcacacaactcgtccctttcacgcgcttcacgatacttccattccatgtcttttcagttcccaagaatagtacctacaacgttagaaaaaaaaaatagtaataagagattcgggtaaatgaccaatttatccataaaagacggaaataaataatttaatttacaaatgtataaatattttggactaaattgtcacctaatatttggctactcaaagcaccccattttggaccaaattgatcattaatgtttgcctcctcaaatcacacctccataagtcaaacatttagtaacaaattagtccaccttctaaattacacttacgttatcgacatcattgtcataaaccacgacaactttgtcaatgtctttgagtgcaactaggtcatctgcatcgtcatgatgacctatcgcgacatcaatgtcacaccaaaaaagcttagttgtaagtatactgagatctacatggccctcaacatcgtcctccagagcgttaacaacacctgccttgtcaccatgctcgcaaccatggacaacgagagcattgccaagatgttccaagtgccatgctagttacatttgtatcatgtgtgaacgaaggttaacaaaaatagtgaagacttgacagttggaccaacttatcacaatatttgtacatttgtggactaaattgattatttcatatttcaaggatcaaattatcgttggatgcatttttcagggactaaattgatcatttacacatagatgtagactttcttatttcataactatttctaaaaggtaaaaatagtttttatagctttttgaaaataaatatttttaaaggaaaatgttttttggacacctaataataatatgctacccaatatatagggagagaaaaaaagagaaaaataatataagtatgataagatttatgatgccataaaaagatagagatgaagataaattgagatgttgatagagtgtttaaaattatgagtaattcatgtatcacaactcatttttttagggtaaatgatgaatttggtctttgtactttacactaactgtcaatttagtttttgtactatggaaataatcaatttagtctataattatgtaaatatatcgacaatttagtcctactatcaactctccttcgtatctattaacgtttttggcaatatggcacatgaaatatgacatgataaatccatgtgttggaagtgaaagccacatgttggactaggtatgtgtggaccaaattgtcaattggagtatgtgtgtgtttttaccttttattaattcaccatttatcctcttcctttttacattttgtgagaaagatgttgaattgtgggtgctaagtttgctttgctctttcctgcctttgcatcatcggtgcctgtgacgacttaacgacagatggtggtgtttggttggtggccactgtttttgtttgattttttcct

SEQ ID NO: 686 - DNA, 417 bp, Glycine max
atgcatggtgacaaggcaggtgttgttaacgctctggaggacgatgttgagggccatgtagatctcagtatacttacaactaagcttttttggtgtgacattgatgtcgcgataggtcatcatgacgatgcagatgacctagttgcactcaaagacattgacaaagttgtcgtggtttatgacaatgatgtcgataacgtactattcttgggaactgaaaagacatggaatggaagtatcgtgaagcgcgtgaaagggacgagttgtgtgcgtggtgtcttcttacctctctgtttccctctacactcccgaatcctcctcactcatctgattgaggatcagattcaagtgcatcttattgttgaaatcatttcctgtttgctgatcctggctgatgaagaagttggaggagattga

SEQ ID NO: 687 - DNA, 1089 bp, Glycine max
atgatgacctatcgcgacatcaatgtcacaccaaaaaagcttagttgtaagtatactgagatctacatggccctcaacatcgtcctccagagcgttaacaacacctgccttgtcaccatgctcgcaaccatggacaacgagagcattgccaagatgttccaagtgccatgctagttacatttgtatcatgtgtgaacgaaggttaacaaaaatagtgaagacttgacagttggaccaacttatcacaatatttgtacatttgtggactaaattgattatttcatatttcaaggatcaaattatcgttggatgcatttttcagggactaaattgatcatttacacatagatgtagactttcttatttcataactatttctaaaaggtaaaaatagtttttatagctttttgaaaataaatatttttaaaggaaaatgttttttggacacctaataataatatgctacccaatatatagggagagaaaaaaagagaaaaataatataagtatgataagatttatgatgccataaaaagatagagatgaagataaattgagatgttgatagagtgtttaaaattatgagtaattcatgtatcacaactcatttttttagggtaaatgatgaatttggtctttgtactttacactaactgtcaatttagtttttgtactatggaaataatcaatttagtctataattatgtaaatatatcgacaatttagtcctactatcaactctccttcgtatctattaacgtttttggcaatatggcacatgaaatatgacatgataaatccatgtgttggaagtgaaagccacatgttggactaggtatgtgtggaccaaattgtcaattggagtatgtgtgtgtttttaccttttattaattcaccatttatcctcttcctttttacattttgtgagaaagatgttgaattgtgggtgctaagtttgctttgctctttcctgcctttgcatcatcggtgcctgtgacgacttaacgacagatggtggtgtttggttggtggccactgtttttgtttgattttttcctgtgcgttgacggtgaaagacaactttataag

SEQ ID NO: 688 - DNA, 318 bp, Glycine max
atgatgacctatcgcgacatcaatgtcacaccaaaaaagcttagttgtaagtatactgagatctacatggccctcaacatcgtcctccagagcgttaacaacacctgccttgtcaccatgctcgcaaccatggacaacgagagcattgccaagatgttccaagttaacaaaaatagtgaagacttgacagttggaccaacttatcacaatattttgaaagccacatgttggactaggtatatggtggtgtttggttggtggccactgtttttgtttgattttttcctgtgcgttgacggtgaaagacaactttataag

SEQ ID NO: 689 - DNA, 9360 bp, Glycine max
  misc_feature (1)..(9360): n = a, c, t or g
gctaattaaattttttaactagatagctctggttgcagccatagatggaatttcccaacgaagcaataccagaagggtgttcacagaagaaaacgggaagggggaaaatagaaatcaagcggatcgagaacacaacgaataggcaagttaccttctgcaaacgccgtaacgggttgctcaagaaggcttatgaattgtctgttctgtgtgatgctgaggttgctcttgttgtcttctcaagccgtggacgcctctatgagtatgccaacaacaggttcaaatattcttttactactaattcaacaccgtactttttctatccttcgatctcatttcatatcttatgaaccatttaaataacacaaaccatatctagaaacaacaagggttttatatatggggttattaagaccttttttcttattatgattatttttgtttgttatgtggtatcatatataactgaaaggcatagttagcagataatcatatgagattaagagtttaattttttaatttatatgtatgaaaaaatgtctattaaaagaggttaattatttaaacaagcattaatactttgaaaaattagtttttttttaacttctgaccgatgaatactctaggttccccgtgtatatatcattctttctaactcttgtacttaattgtttctctatcacgcgtcttcccagtgatttgtttagaagggtgcagatctgtgtaagcgatagaaattatagacgttaaggtgaaacaatatgaagtatgtagcagatgaagagaaagctttagttagggttacaaagatttgcaggtgagaaatcttagcttcctggtgtatctgttattgttaagctttaccaatccctctctcttgagtttctctctccacttgtcatccatcaaatcttaaaagggtctggcctgctgcacaaagctgtcatgcactcaatgagccgctgcttccatcttgactcctccttaataccacttatttgtcaatatatagtgacacaacacaaacatctcatccaattgggagttagggtttcagacttttcactatttagtatttagtcacacctcaatcacttcaattcgtttttccatatgtacataaagttggaggaagaccacttcaattctaatgagagatagatcacggggaaatgcgcagaaactgcaaactaattaaataaccctttcggacttttattcacatagtaaacttgtatattttttattatatatatatatatatatatatatatatatatatatatatctttttattgtataattttttattagataacaaaaatgtaatttgtactaatatagtttctctttttaagaatatttttatctaaagtatcacgaagaagcaatcaaatcggatattagggatcttgattcaaaatgggtacagttttctttaaagttgcaacagaattttcacaggattagttgtttataatcaattaagggcatttttagtctataatgcttcaatattttttaaaaattcttactaaagtattcgttataaactgtttttgagcataaagtaaataaatttaaactaataagtatatcgagggttatggatgtcccaatttgtttcccattttcgtaaattttgtcctttacataatggaggaaagtctaatatggttagggcgtttcccagcccatatgggtattatctggtgattttactttaaataacttgaatttcttttgggtacgtaaaacaaaaaacaaaaaacaaatgaatgtaagatgaaaaggcaaaacgtgtaaaagcaaacgtgtaagaatttgattttgtgcataaaactataaaattatgaagtgtagagaaacaacttttaggagaaataaatatttttagaagtgtagagacacaatttttatgagaaactacaaactcattttctcatcctcatctcctatatttcttaagaaaatacatcatagtatttagatattattattctcgcttctgatgtctttaccctaagtagctaaaagtaacatgatgatagcagattctaagaatggctaaaggcaaattagttctctttcccatatgtttttattgctttcatcattgtggaataaagcttctgattcctgacgtcaattctttacctattctctccattatatatgtgttttggacacttcaattaaagagaaatttaaacttacaccggcccactgatgcaacatcgacctcttcctgcatactcagtaaataaccactttgtatttgaactttagagaagctcagacagatgggatttaccattctttaagatcaaaagaatgaaacttcatgtgtttaaccatactcaatcaactagcttgttaatttgtgttcttattagaaaaatttagagagggcctaacactgtaaggtaaacaaagaaattaaagcaaagagatcagtgagctatttatatgaaagaaaaatactaataacatttttttaatattagttataattatgagtaagactcactagataagattaaaaaaaaaattataatttataataattttcaatcaataacaaagaatgtgttagataatttgtttctaatatttctcttatatgtaatagatgtaatgtaatttctcaatttcatagactccaatggttattgaaattaaaaattataagatttaaatatgtttttagtcttcataaaattaacatgttatttggttcttataaatttttttctttactttccatccctttaaaatttaaaattattgatgttttccttataatatgaataaattttgattttcatccctataaaatatttttcttattttaatctctagaaataatttttaagatattacatgtcaacattgtaccatatatagacactagttgttgttacctaagaagatcgcttgacattccgtgaataggggacgatttaaggacttgagagatctaaaataaatttaaaaatgagatcttttatttactcataaaataatttattaaaattattattattttaaagagaatagaaataaaaaaagttttttagtttctttaacaattaactattaaatctcttttttctaaacaaagttatgatattgatgaaaagttattacttattaattgttacttatagtaccaataaaaagattaacagttacttataatattttaattaaaatttatttttaaatataattttacaataattttttttaaggtatattagtactaaaaaaaatttgggatcttttttttttgaacctaaagccgttgtttgggccttaagccagcctgtcgctgaacatataagctattaacgaatgtcacacaataataatagagatcaaaaataaaattttaactttttgcgggatgaaaattacaagtaaaattataaggaaaaaaaaatcaaaattactaattttatagaaattaaaaatatatttaagtcaaattataaagatacacccacttttattacaatctcaaagcttttttacctaagaatataatgtcaaagaagatgaattcataattaatttgtaaactacagattaagtcgtcaccgtgtacgtgttttggtaaaattagcatgtactttatcacatttgtatgtttctatttgttgtattgttttgcagtgttagaggaacgatcgataggtacaagaaagcatgtgctgcctccacaaatccagaatctgtctctgaagctaatacacaggtatatttagtaagctaaaaaaaaatcaaagaaatgatagaaaatgctcttgtttggttaatttggtccagaataaatgttgttttaaaattacggcatatttttcttaatagaataacagcgtgaaggttaattatttcaagctacaaatcttctcaaagccactaaaatcctttatcattaggatactctaatagactaatgcttatttttgaatgtgacatttacgagttcaaatgttccaggggcatcttcaccaatnnnnnnnnnnnnnnnnnnnnnnnnnnnnnnnnnnnnnnnnnnnnnnnnnnnnnnnnnnnnnnnnnnnnnnnnnnnnnnnnnnnnnnnnnnnnnnnnnnnnnnnnnnnnnnnnnnnnnnnnnnnnnnnnnnnnnnnnnnnnnnnnnnnnnnnnnnnnnnnnnnnnnnnnnnnnnnnnnnnnnnnnnnnnnnnnnnnnnnnnnnnnnnnnnnnnnnnnnnnnnnnnnnnnnnnnnnnnnnnnnnnnnnnnnnnnnnnnnnnnnnnnnnnnnnnnnnnnnnnnnnnnnnnnnnnnnnnnnnnnnnnnnnnnnnnnnnnnnnnnnnnnnnnnnnnnnnnnnnnnnnnnnnnnnnnnnnnnnnnnnnnnnnnnnnnnnnnnnnnnnnnnnnnnnnnnnnnnnnnnnnnnnnnnnnnnnnnnnnnnnnnnnnnnnnnnnnnnnnnnnnnnnnnnnnnnnnnnnnnnnnnnnnnnnnnnnnnnnnnnnnnnnnnnnnnnnnnnnnnnnnnnnnnnnnnnnnnnnnnnnnnnnnnnnnnnnnnnnnnnnnnnnnnnnnnnnnnnnnnnnnnnnnnnnnnnnnnnnnnnnnnnnnnnnnnnnnnnnnnnnnnnnnnnnnnnnnnnnnnnnnnnnnnnnnnnnnnnnnnnnnnnnnnnnnnnnnnnnnnnnnnnnnnnnnnnnnnnnnnnnnnnnnnnnnnnnnnnnnnnnnnnnnnnnnnnnnnnnnnnnnnnnnnnnnnnnnnnnnnnnnnnnnnnnnnnnnnnnnnnnnnnnnnnnnnnnnnnnnnnnnnnnnnnnnnnnnnnnnnnnnnnnnnnnnnnnnnnnnnnnnnnnnnnnnnnnnnnnnnnnnnnnnnnnnnnnnnnnnnnnnnnnnnnnnnnnnnnnnnnnnnnnnnnnnnnnnnnnnnnnnnnnnnnnnnnnnnnnnnnnnnnnnnnnnnnnnnnnnnnnnnnnnnnnnnnnnnnnnnnnnnnnnnnnnnnnnnnnnnnnnnnnnnnnnnnnnnnnnnnnnnnnnnnnnnnnnnnnnnnnnnnnnnnnnnnnnnnnnnnnnnnnnnnnnnnnnnnnnnnnnnnnnnnnnnnnnnnnnnnnnnnnnnnnnnnnnnnnnnnnnnnnnnnnnnnnnnnnnnnnnnnnnnnnnnnnnnnnnnnnnnnnnnnnnnnnnnnnnnnnnnnnnnnnnnnnnnnnnnnnnnnnnnnnnnnnnnnnnnnnnnnnnnnnnnnnnnnnnnnnnnnnnnnnnnnnnnnnnnnnnnnnnnnnnnnnnnnnnnnnnnnnnnnnnnnnnnnnnnnnnnnnnnnnnnnnnnnnnnnnnnnnnnnnnnnnnnnnnnnnnnnnnnnnnnnnnnnnnnnnnnnnnnnnnnnnnnnnnnnnnnnnnnnnnnnnnnnnnnnnnnnnnnnnnnnnnnnnnnnnnnnnnnnnnnnnnnnnnnnnnnnnnnnnnnnnnnnnnnnnnnnnnnnnnnnnnnnnnnnnnnnnnnnnnnnnnnnnnnnnnnnnnnnnnnnnnnnnnnnnnnnnnnnnnnnnnnnnnnnnnnnnnnnnnnnnnnnnnnnnnnnnnnnnnnnnnnnnnnnnnnnnnnnnnnnnnnnnnnnnnnnnnnnnnnnnnnnnnnnnnnnnnnnnnnnnnnnnnnnnnnnnnnnnnnnnnnnnnnnnnnnnnnnnnnnnnnnnnnnnnnnnnnnnnnnnnnnnnnnnnnnnnnnnnnnnnnnnnnnnnnnnnnnnnnnnnnnnnnnnnnnnnnnnnnnnnnnnnnnnnnnnnnnnnnnnnnnnnnnnnnnnnnnnnnnnnnnnnnnnnnnnnnnnnnnnnnnnnnnnnnnnnnnnnnnnnnnnnnnnnnnnnnnnnnnnnnnnnnnnnnnnnnnnnnnnnnnnnnnnnnnnnnnnnnnnnnnnnnnnnnnnnnnnnnnnnnnnnnnnnnnnnnnnnnnnnnnnnnnnnnnnnnnnnnnnnnnnnnnnnnnnnnnnnnnnnnnnnnnnnnnnnnnnnnnnnnnnnnnnnnnnnnnnnnnnnnnnnnnnnnnnnnnnnnnnnnnnnnnnnnnnnnnnnnnnnnnnnnnnnnnnnnnnnnnnnnnnnnnnnnnnnnnnnnnnnnnnnnnnnnnnnnnnnnnnnnnnnnnnnnnnnnnnnnnnnnnnnnnnnnnnnnnnnnnnnnnnnnnnnnnnnnnnnnnnnnnnnnnnnnnnnnnnnnnnnnnnnnnnnnnnnnnnnnnnnnnnnnnnnnnnnnnnnnnnnnnnnnnnnnnnnnnnnnnnnnnnnnnnnnnnnnnnnnnnnnnnnnnnnnnnnnnnnnnnnnnnnnnnnnnnnnnnnnnnnnnnnnnnnnnnnnnnnnnnnnnnnnnnnnnnnnnnnnnnnnnnnnnnnnnnnnnnnnnnnnnnnnnnnnnnnnnnnnnnnnnnnnnnnnnnnnnnnnnnnnnnnnnnnnnnnnnnnnnnnnnnnnnnnnnnnnnnnnnnnnnnnnnnnnnnnnnnnnnnnnnnnnnnnnnnnnnnnnnnnnnnnnnnnnnnnnnnnnnnnnnnnnnnnnnnnnnnnnnnnnnnnnnnnnnnnnnnnnnnnnnnnnnnnnnnnnnnnnnnnnnnnnnnnnnnnnnnnnnnnnnnnnnnnnnnnnnnnnnnnnnnnnnnnnnnnnnnnnnnnnnnnnnnnnnnnnnnnnnnnnnnnnnnnnnnnnnnnnnnnnnnnnnnnnnnnnnnnnnnnnnnnnnnnnnnnnnnnnnnnnnnnnnnnnnnnnnnnnnnnnnnnnnnnnnnnnnnnnnnnnnnnnnnnnnnnnnnnnnnnnnnnnnnnnnnnnnnnnnnnnnnnnnnnnnnnnnnnnnnnnnnnnnnnnnnnnnnnnnnnnnnnnnnnnnnnnnnnnnnnnnnnnnnnnnnnnnnnnnnnnnnnnnnnnnnnnnnnnnnnnnnnnnnnnnnnnnnnnnnnnnnnnnnnnnnnnnnnnnnnnnnnnnnnnnnnnnnnnnnnnnnnnnnnnnnnnnnnnnnnnnnnnnnnnnnnnnnnnnnnnnnnnnnnnnnnnnnnnnnnnnnnnnnnnnnnnnnnntattctgtgttctagcttacattttaattctcctatcactaaattaattgctataacataatgctcctccacaaggtttctctaactgctcgacactatttatcaataccagttttatcagcaggaagcgtccaaattaaaacgacaaatcagagacattcagaatctaaacaggtcaatgttccattctcttaaaaatattattcagcagacttctccagtgaaatgaaaaaactcaatgtgattttttgcattccaggcacatccttggtgaagctcttagctctctgagtctgaaggaattaaagaacctggagagtagactggagaaaggtttaagcagagttagatccagaaaggtattatactatcagcatgaagcatcttaagcttctaaatatataggcattgtgaatttatgtagatatgcaataagttagtaaaaaactagcaactaattaagataatttcagttagtattttgaataaaatggtttgcctattattttgaaaattccaagttagaatatctctattcctttggactaactacgcactccaattctttcagcatgaaactttgtttgccgatatcgagttcatgcaaaagcgggtactcatcatttccttcgatgctattagcttctgcttaacttatttgcttcacacacacacacacacacatatatatatatatatcaaagttttacgatattgaaaccaaatacatattttcaattaataggaccaagaatatgaaactgaaacgggataaacccagaagaaattccaataatcgtgaaaaataaagtaaaaatggcatgactgcttcgtacgaagggaattataaaatcttgcaaatttatgcctgatatttatatttcttctaacatgaacattacacttgctggaaaaatgcaggaaatagagctgcaaaaccataataattttctgagagctaaggtgatctcttaattctctccaagacttatatataaagtgtatgttgagatgaatgataattaataatatatagttggttgatgatgcatgcatgcatgtagatagctgaacacgagaaagcacaacaacggcaacaggatatgataccgggaaatgtgtgcgagtcaaccatacctccacaatcatatgaccgcaatttcttccctgttaatctcatagattccaataatcaatattcaaatcaagaccagactgctcttcaacttgtgtaagtacactcatcatccattgttaattacaagttgttgttattgaatgcccttttaataattattaattgatgaaaactaaaacaaggtagaggggcaatgaccaatgaaacaaacaacttaattactttcaacattgtaccattcctttatatgcatgcaaccatatatgcattatataaggtttttaaatggctaataacaacatgggttttagtgtgggaacgtggttagcggacgttcaacttaaatgactcaggctgtgtttgtattgccctttagcagtttcaacgccaaagctttctctcagtaaagttgtggttcaacgtgcattggaacataagaaacagttcaacttacatatatatcatttgacttgtttttaagtcatcaatgtaggatttgttattcagcatctccccaatccaaatggcatagccaagctataacttgttttcaatagtcaaccaggataaatttcacatttgatcgagattcaaagataatagctcctagtcaagtctttttttttttaaatcccttttccttttttgtttatgaccatgttttcttttctgggcaggtgggtttttttaattttctttcttaatactgtttctcgcttttggatttagtgttttcttatatatgaaattttttgatagaaaaagatgagtggacaccaatatggtaatatgctgtgttttttatatatatataaatccataagttcatgattttgatagatgattccccatggcaacattaactaaccattttgatatgtttctcgcttccttaaattctcgcctttggatgcagctgataaacgatttgaaattatgccgcagcctttcaagtggtgtgggatcccttacatcgtcctatgtttcgtgaaggagagtgcccttagaaactcctctgctaaagttcttacaacggagaacaagagaaaaactaatcagcatttgtaccaatacatcatttgatattgtttatgtatctttcaatatatatagtttctattcagtcctggcatattgtatttttatgttataaatgcttatttcaatatgaacactatatctatcgaggagta

SEQ ID NO: 690 - DNA, 771 bp, Glycine max
atggaatttcccaacgaagcaataccagaagggtgttcacagaagaaaacgggaagggggaaaatagaaatcaagcggatcgagaacacaacgaataggcaagttaccttctgcaaacgccgtaacgggttgctcaagaaggcttatgaattgtctgttctgtgtgatgctgaggttgctcttgttgtcttctcaagccgtggacgcctctatgagtatgccaacaacagtgttagaggaacgatcgataggtacaagaaagcatgtgctgcctccacaaatccagaatctgtctctgaagctaatacacagttttatcagcaggaagcgtccaaattaaaacgacaaatcagagacattcagaatctaaacaggcacatccttggtgaagctcttagctctctgagtctgaaggaattaaagaacctggagagtagactggagaaaggtttaagcagagttagatccagaaagcatgaaactttgtttgccgatatcgagttcatgcaaaagcgggaaatagagctgcaaaaccataataattttctgagagctaagatagctgaacacgagaaagcacaacaacggcaacaggatatgataccgggaaatgtgtgcgagtcaaccatacctccacaatcatatgaccgcaatttcttccctgttaatctcatagattccaataatcaatattcaaatcaagaccagactgctcttcaacttgtcctttcaagtggtgtgggatcccttacatcgtcctatgtttcgtga

SEQ ID NO: 691 - DNA, 3743 bp, Glycine max
ctcatcttctttctcaatcctcaaccagtaacctttcaatttctctctcttctgctctcactctctcacttggggtacgtatgttgtgttcttcattctccaattgcacgttttctttcatttctcaattcaatttctctcatttccctcttccttttaatctgtgaggaaaagggaattgtggtttctctttatttcagttcaatttttcttcttagtgtaaaaaaattacctttattattatgtggagattgattcctgtaatttgttgaagggttgaagatgagaatttgtggagcaggtatgggttgatattggatttcctttaatttatttggtggacttatttccttcatgtttatgcacccaattctattaacaattctgggtcatgtgagtttggttttatttttatgttattctgtcgcaattcccaatttatgaatagcatcgggtgcacactgggccagctgtttgcatgagaaaatataaatttatttattggcacaatctttgacccaatacggatatccatttgttggaaattctatgaaattggaatcttatactatactaattgtcttctttttcttcccccaagtgagtgctaataattaaaccataaatcacttctatatttcataacaaggacttgtttttctctatttctgtctgattgcatacatgcatgaaagaaagagtatcagctaattgttttatttgaagaaaaaatagtggcgtgcttaagtgttaaattagtgttcaatagtaggcacagttgtatgagagtctgcagcttgtaaagttgtagtccatgtttgggggagaaaatacatatactataagaaaaaatatccaaaagttagagggagaaatatatgtgattaagactagaacataaagtgatgtgatgggatgggagtttaagttattttgaaacctaatcatctttataaaatttaggacgtgtttggtttcagaaaatatgtattcaatttttatttttataaataaatataaaaatcttatcttgcatttactttgtttactattttccatgttctacaaattattttggttggtcctagcacaaatccttgacaatagggaacaaagtaagcataagatgatatttttgtaattatatgtgagaattcaaaatgaaaacagagaataattattttattagttcagatgatccttgattcatgtaaattttttatcattaccaatatacaagtgccatgtggtatagtaataaaaagtagcaccatatggatgagtgattcaaaattaatttttaaacttcctattatctgttcaaatttgtaacttcagctgtcttggcatcctgatttggtggctcttttgtttttttcatatatacaagagcattttgaagttgattatttcatctagaaaaggactctcatgttactcaaatgcttagcagcaatcagcagcagctacaccaccacgtccaattcgcttttagtgtttgcttcctcttccctctccagtcctgccaaaaccaagttcctgccctcactttctagattttctgtcaagcgtctctgcttcctttcccaaactcgtccgcacatttccgtgaacaagccctccatgaacctgttgaacagactcgggtttggcagcgcaagagcaccagagaacatggattcatccattcctcagggtccagatgatgacataccagcaccaggccagcagtttgccgagtttggtgctggctgcttttggggtgttgagttggccttccagagggtgcctggtgtgaccaagacagaggttggttacacccaggggcttgtgcataatccaacctatgaggatgtgtgtacagggaccacaaaccactcagaggttgtaagggttcaatatgatccaaaaatttgtagctatgagactctgcttgacgtgttctgggctagacatgatcccaccactctgaatagacaggtatatatgaagttttttgtttgtgttattcaccgtatcatgtaaaaatgaggtagtctggtttctaattgatatttctagactttgctgatctgaataataggtctagattttgtgtattgtcagcataaatgatttttgttacttttggggtttctgtacaattgtttaatgatgcactacttctagagttaaacattttgcccacacttttttgattccatgattcatttctctatagtaaattagtaatattggttttctctatgtagccagtatttaacagatacatttatggtttgatatctagtcatgtctgttttgtaaattctgttttaatatgatattgtgttgaattttgggttgcatcaaattgcaggggtctcttggtaatagttgtttaggctgtttttacccttctgtttgcacttggtgggatgtttataggggtgtaatgtaatagatggtttggataaattaagttggattaaaatggatggttaaaaaaataaaccattagttcatttatgatgtggtagaattttattaaaaaaaatccaaaccatccatgactttatatgataaagaaaaatcccaacccatgcattaattatgtttcatgtgtaagatatccaatccatccatttattttatttttcctcttgtcaacaaaaatcctctctttaaaacatctcttcttatgagcactgttttcaaaagaacctgcaatgagcccgagctcctatgattatcattgatccaatatcttaacatttgatggattgtctcctttctttgtacattctgtaactccatttatcagttgcatttaggagttcattgcaatgatggttttactttaatttcagtgtggtaatgtactagttccaacttcttatgttggacttcaattatgtatggctctccagaatggcttgtgagcatccaaaaataagttttcatatggagtaatctatttcagtatttcctttgctacatttttttcttgtccgtttgtttcttttgttctcccctttcaatatgcatacttaatacatggatatctatctctctatatatggatacaaagttttcgtgttcttgattcccaagcgtagtgcttctttcccaatgctgcctatcagtactactagtaggttagggttttttcttgaattcactcttccatccaaatccatgcacacacgaactttagaaaatatggtgactagttatgatatgcagcagcacatacatggattgtacattctaccgcttaagcgcttagttgctgtttgatcttgttgtgtggcaggggaatgatgtgggaacacagtacagatctggaatatactactacacaccggaacaagagaaggcggccaaggagtcattggagcaacagcagaagcagttgaacaggaagattgttactgagatccttcctgccaagaagttctacagggcagaggagtaccatcagcagtaccttgagaaaggtggccgatctggtttcaagcaatctgcttctaaaggctgcaatgatccaattcggtgctatggttaactgccataaatgaattgccatcaaagatcaatgcaaccggttcttcagatattgaaagtccatagttttgtttgtatttgttaatatatcaacaaagcttgtgcacactgtatttgaggttgaagatggacatagccataaattcagttgtagagttgtatattgtcttttatatataatatggctttgctttaaa

SEQ ID NO: 692 - DNA, 801 bp, Glycine max
atgttactcaaatgcttagcagcaatcagcagcagctacaccaccacgtccaattcgcttttagtgtttgcttcctcttccctctccagtcctgccaaaaccaagttcctgccctcactttctagattttctgtcaagcgtctctgcttcctttcccaaactcgtccgcacatttccgtgaacaagccctccatgaacctgttgaacagactcgggtttggcagcgcaagagcaccagagaacatggattcatccattcctcagggtccagatgatgacataccagcaccaggccagcagtttgccgagtttggtgctggctgcttttggggtgttgagttggccttccagagggtgcctggtgtgaccaagacagaggttggttacacccaggggcttgtgcataatccaacctatgaggatgtgtgtacagggaccacaaaccactcagaggttgtaagggttcaatatgatccaaaaatttgtagctatgagactctgcttgacgtgttctgggctagacatgatcccaccactctgaatagacaggggaatgatgtgggaacacagtacagatctggaatatactactacacaccggaacaagagaaggcggccaaggagtcattggagcaacagcagaagcagttgaacaggaagattgttactgagatccttcctgccaagaagttctacagggcagaggagtaccatcagcagtaccttgagaaaggtggccgatctggtttcaagcaatctgcttctaaaggctgcaatgatccaattcggtgctatggttaa

SEQ ID NO: 693 - DNA, 3172 bp, Glycine max
gtgaggaatcttggtcgccatcgcgcacccgcgaaccagaaatttcaattccctccattttcccctcaaattcaaatcccctaaagtctcccttatatacattacaaacacacacctcaattcaatttccatggcgaacttcgaagtgccctcattttccctaggcctcgacgatacgcccccccattccccaatccatccacctctttctcccgatcttcacgtctccgactccgactccgactccgatcccgaatcccgacccgacccgcctcgccccctcctcaaacgcctccgccgcgggcccccgccaccgtgtctcgaccccgatgccgacgccgacgatgacatcgaggatttctcctcgcaagaagatcccgatcaaggtcaggttagctaacacttctaatatttcacctctctctccgcttttcaattttaaataataataataataataatttccctattatttatctgttgtaatattattagggcatgcggttccatcggcgtggaatcgaaatcattctgtgtgtagcagctcgaaagtttcgttgaatagaagtggggttttgacccctcattcgtgtagcaactctttcagggataggaaaagaaaggaactttctaatgatgttccggcttcagccaggttagagacagggaagagtggcttgatgtttcccaagttaaccactagtcctctccgaaggtttcaattgattgattcggactccgatgatgctgatgttggtgttggtgctggtactagtgatgccaataaagttaaccctaatagtcatttggaacaagagaagaaaacatctgctgacgagaacagaaatgaggatctgtggaaggatttttcgccggtgaagaatgtttctgttaataggtttcaattgctttcagattccgatgattcggatgttgatgttggtggtgccaataaagttaacactaacagtcgtttggaacaagataataaaacttcggttgatgtgaacggaaataaggatcagtggaaggattttttgccggtgaagaatgtttctgttagtaagtttcaattgctttcagattctgatgattcagatgttgatgtggatgtaggtggtgccaataaagctaaccctaaccgtcatttagaacaaaataagaaaacatcgcctgatgatgatctatggaaggattttttgccggtgaagaatgtttctgtccccacgcccgccttcaatgagatatgtgaagaatactttcgttctgccaattgcaaggaagtaggtggtgatgcatctaaaagttttagtgagaggaatcctggggttagttctagctgccagaggtatcaacaacgatgggaatcaacagaccccgttcatcctgctcatagttattttttccatgaggatccgagaattcagcagttagtccgcagccgcctgcggaattttaatccactaggtaccatcaacacagtgaatcagcaacctaatttctcacacattgattacatgtaagttgtaacccatgtttgttttttgttttaatcttttggtaatgatttaaaaagaaagtgattgtcattttgtattttatattgtttgggtgtattttgctttcaggggacaatttggtaatggaggagcctcaaacatgcagggagttcaaaatggttttattaattgctcaacaagggggggaaacaaatcaagtaatttgaatgttgatggatcttttaatgcttctggaggctgggtggatcccaaaattgtttctccattcagccatggggaatcttctagaaagaaagcaacaaagaggaatggctctaagaatagtgtctcaaaaagtaatagtaaagcaaacaaatcaaaccctgcgaaccaatcatgtgcttctgggggctgggtggaacccaggagctgcaccagtttgccaaaggatgcaggcaaaaggcgtgttcaagcaagtggtgaatctgctggtcattggtttacatcgccagaaggaagaaaggtatgagaaaaaatcttaaaattttgatgtttaatgttattaagtattaactggttaaatttatttacttttctcatgttagatgctggtcataagaagttatgcgagctgttttgttatgttgtttaaaattgaaatgcaaaaaacccatacagtatgttacttaagatgtatatagatgcaatgaaattcaaattatcacattacataatgccttttttttgtgtggaaatattgttctatgatttgatgcacacgatcccatcattccaatataactatgtaaccctagatagtgatactcaatctcccattgtttttgtcaacattcttttgacattaagatgaattgttatatagggaccaattcctacttgatgtttaattcctagttgatgtttaatggcagggaccaattcctagtggttttgaaattataggaccagaaccaaaattgtgaaaagcttttaagcctttttcaaaccaatctattttgtcatattgtataaatctattagaatctgattctttatttacccccggcaggtttatgtcaacaaaagtggggaggagttgacaggccgcaatgcttatagacaatatcggaaggtacatatacttgcataccattctgatgttttgttgtccttttggttgtgatgtagcactgaatgcctttgatgtttacaggagagtggagcaggattcaagaaatcaagaaagaaaaaaggtgccaagacgacaaatgccaagaagaggaactgaacacttgatggcaagacatttattccccgcctggtccacaccccataatttacttgtggatcttatgactagcaataccctataggttcaattatgctaaattgccctaaacttccggtatcatgtgttgaatgcggacaaggaagctagccatccagcatgcggcatcacacgaggaaactgaatgagggtcttgttgcttagtggagatttgattctaaaaaatcctggcaagtagatattgtgagcttattatacaagtggttctgtacagggcacacggacctaatgtctttggccatcatgaaattgtaactttggataaccattcacttttttatttattaggattcacaataatgcttcgattccatcttgattctcc

SEQ ID NO: 694 - DNA, 1200 bp, Glycine max
atgtttcccaagttaaccactagtcctctccgaaggtttcaattgattgattcggactccgatgatgctgatgttggtgttggtgctggtactagtgatgccaataaagttaaccctaatagtcatttggaacaagagaagaaaacatctgctgacgagaacagaaatgaggatctgtggaaggatttttcgccggtgaagaatgtttctgttaataggtttcaattgctttcagattccgatgattcggatgttgatgttggtggtggtgccaataaagctaaccctaaccgtcatttagaacaaaataagaaaacatcgcctgatgatgatctatggaaggattttttgccggtgaagaatgtttctgtccccacgcccgccttcaatgagatatgtgaagaatactttcgttctgccaattgcaaggaagtaggtggtgatgcatctaaaagttttagtgagaggaatcctggggttagttctagctgccagaggtatcaacaacgatgggaatcaacagaccccgttcatcctgctcatagttattttttccatgaggatccgagaattcagcagttagtccgcagccgcctgcggaattttaatccactaggtaccatcaacacagtgaatcagcaacctaatttctcacacattgattacatgggacaatttggtaatggaggagcctcaaacatgcagggagttcaaaatggttttattaattgctcaacaagggggggaaacaaatcaagtaatttgaatgttgatggatcttttaatgcttctggaggctgggtggatcccaaaattgtttctccattcagccatggggaatcttctagaaagaaagcaacaaagaggaatggctctaagaatagtgtctcaaaaagtaatagtaaagcaaacaaatcaaaccctgcgaaccaatcatgtgcttctgggggctgggtggaacccaggagctgcaccagtttgccaaaggatgcaggcaaaaggcgtgttcaagcaagtggtgaatctgctggtcattggtttacatcgccagaaggaagaaaggtttatgtcaacaaaagtggggaggagttgacaggccgcaatgcttatagacaatatcggaaggagagtggagcaggattcaagaaatcaagaaagaaaaaaggtgccaagacgacaaatgccaagaagaggaactga

SEQ ID NO: 695 - DNA, 15 bp, Artificial Sequence
  Reagent probe or primer
ctgttggcatactct

SEQ ID NO: 696 - DNA, 15 bp, Artificial Sequence
  Reagent probe or primer
ctgttggcatagtct

SEQ ID NO: 697 - DNA, 20 bp, Artificial sequence
  Reagent probe or primer
tggagaacccttggatttca

SEQ ID NO: 698 - DNA, 20 bp, Artificial sequence
  Reagent probe or primer
ccctttctgaagcaaagcat

SEQ ID NO: 699 - DNA, 16 bp, Artificial sequence
  Reagent probe or primer
cctcaggattgttaaa

SEQ ID NO: 700 - DNA, 17 bp, Artificial sequence
  Reagent probe or primer
cctcagaattgttaaat

SEQ ID NO: 701 - DNA, 27 bp, Artificial sequence
  Reagent probe or primer
ctgaatatctttctggcttctttatct

SEQ ID NO: 702 - DNA, 18 bp, Artificial sequence
  Reagent probe or primer
tcaagcagttcgccaagg

SEQ ID NO: 703 - DNA, 16 bp, Artificial sequence
  Reagent probe or primer
atttccatcagcccaa

SEQ ID NO: 704 - DNA, 14 bp, Artificial sequence
  Reagent probe or primer
atttccatccgccc

SEQ ID NO: 705 - DNA, 20 bp, Artificial sequence
  Reagent probe or primer
tattcccgaccaccttcaac

SEQ ID NO: 706 - DNA, 21 bp, Artificial sequence
  Reagent probe or primer
gggatccagtggaaaatagga

SEQ ID NO: 707 - DNA, 17 bp, Artificial Sequence
  Reagent probe or primer
cttggaatagtgatttt

SEQ ID NO: 708 - DNA, 17 bp, Artificial Sequence
  Reagent probe or primer
cttggaatagtgaattt

SEQ ID NO: 709 - DNA, 20 bp, Artificial sequence
  Reagent probe or primer
taagccttcctaggctgcaa

SEQ ID NO: 710 - DNA, 21 bp, Artificial sequence
  Reagent probe or primer
cccaaacttcaaacaggaaca

SEQ ID NO: 711 - DNA, 15 bp, Artificial sequence
  Reagent probe or primer
ctacaggaaaagttc

SEQ ID NO: 712 - DNA, 15 bp, Artificial sequence
  Reagent probe or primer
ctacagggaaagttc

SEQ ID NO: 713 - DNA, 25 bp, Artificial Sequence
  Reagent probe or primer
tctcatgaagtggataggaatacaa

SEQ ID NO: 714 - DNA, 20 bp, Artificial sequence
  Reagent probe or primer
atccaacccaacaaatgacg

SEQ ID NO: 715 - DNA, 17 bp, Artificial sequence
  Reagent probe or primer
acgtaaaatcacggatc

SEQ ID NO: 716 - DNA, 17 bp, Artificial sequence
  Reagent probe or primer
cacgtaaagtcacggat

SEQ ID NO: 717 - DNA, 20 bp, Artificial sequence
  Reagent probe or primer
agatcgcagttgggttctcc

SEQ ID NO: 718 - DNA, 27 bp, Artificial sequence
  Reagent probe or primer
agaatttctgcatgatttctctgttac

SEQ ID NO: 719 - DNA, 18 bp, Artificial sequence
  Reagent probe or primer
ctccatcttctacagctg

SEQ ID NO: 720 - DNA, 17 bp, Artificial sequence
  Reagent probe or primer
ctccatcttctgcagct

SEQ ID NO: 721 - DNA, 26 bp, Artificial sequence
  Reagent probe or primer
tgacgaaactgtagatgcttattctg

SEQ ID NO: 722 - DNA, 21 bp, Artificial sequence
  Reagent probe or primer
gcttgtggtcttgcttctgtg

SEQ ID NO: 723 - DNA, 20 bp, Artificial sequence
  Reagent probe or primer
cttttgactatccttgagtg

SEQ ID NO: 724 - DNA, 18 bp, Artificial sequence
  Reagent probe or primer
ttgaccatccttgagtgt

SEQ ID NO: 725 - DNA, 24 bp, Artificial sequence
  Reagent probe or primer
aggctttcgatcattgtattttct

SEQ ID NO: 726 - DNA, 21 bp, Artificial sequence
  Reagent probe or primer
cagtcatggcttcaccatagc

SEQ ID NO: 727 - DNA, 17 bp, Artificial sequence
  Reagent probe or primer
aattgtgtctgaatgaa

SEQ ID NO: 728 - DNA, 18 bp, Artificial sequence
  Reagent probe or primer
aattgtgtatgaatgaac

SEQ ID NO: 729 - DNA, 20 bp, Artificial sequence
  Reagent probe or primer
tactggccatttccacgatt

SEQ ID NO: 730 - DNA, 22 bp, Artificial sequence
  Reagent probe or primer
tgtgtggcaattacttttgtgc

SEQ ID NO: 731 - DNA, 14 bp, Artificial sequence
  Reagent probe or primer
cctgaccgatttaa

SEQ ID NO: 732 - DNA, 15 bp, Artificial sequence
  Reagent probe or primer
acctgatcgatttaa

SEQ ID NO: 733 - DNA, 26 bp, Artificial sequence
  Reagent probe or primer
tatttccttctagttgacacttgagc

SEQ ID NO: 734 - DNA, 20 bp, Artificial sequence
  Reagent probe or primer
tgacaaaatcgtggaaatgg

SEQ ID NO: 735 - DNA, 14 bp, Artificial sequence
  Reagent probe or primer
taggtcaaaaccgc

SEQ ID NO: 736 - DNA, 14 bp, Artificial sequence
  Reagent probe or primer
taggtcaaacccgc

SEQ ID NO: 737 - DNA, 25 bp, Artificial sequence
  Reagent probe or primer
aaactaatgggctaaagttcaacac

SEQ ID NO: 738 - DNA, 28 bp, Artificial sequence
  Reagent probe or primer
tttagtaataatgtcaattgatgctttg

SEQ ID NO: 739 - DNA, 18 bp, Artificial sequence
  Reagent probe or primer
caaattagcaactggtgg

SEQ ID NO: 740 - DNA, 13 bp, Artificial sequence
  Reagent probe or primer
aactggcggcaac

SEQ ID NO: 741 - DNA, 21 bp, Artificial sequence
  Reagent probe or primer
tgcagtgctctcatgactctg

SEQ ID NO: 742 - DNA, 20 bp, Artificial sequence
  Reagent probe or primer
gcatgcagatcaaccaacat

SEQ ID NO: 743 - DNA, 19 bp, Artificial sequence
  Reagent probe or primer
ttcttctttagtggaacct

SEQ ID NO: 744 - DNA, 19 bp, Artificial sequence
  Reagent probe or primer
ttcttctttagtggagcct

SEQ ID NO: 745 - DNA, 20 bp, Artificial sequence
  Reagent probe or primer
ggcaagcctggatacatcat

SEQ ID NO: 746 - DNA, 20 bp, Artificial sequence
  Reagent probe or primer
tcctggcagaatatgcaaca

SEQ ID NO: 747 - DNA, 16 bp, Artificial sequence
  Reagent probe or primer
cagattcagagacttt

SEQ ID NO: 748 - DNA, 16 bp, Artificial sequence
  Reagent probe or primer
cagattcaaagacttt

SEQ ID NO: 749 - DNA, 31 bp, Artificial sequence
  Reagent probe or primer
ttaatagtaaaacttaacagaatgtgaggaa

SEQ ID NO: 750 - DNA, 21 bp, Artificial sequence
  Reagent probe or primer
cctttgagggcattctactgg

SEQ ID NO: 751 - DNA, 18 bp, Artificial Sequence
  Reagent probe or primer
acctacataactttgaac

SEQ ID NO: 752 - DNA, 18 bp, Artificial sequence
  Reagent probe or primer
acctacataagtttgaac

SEQ ID NO: 753 - DNA, 20 bp, Artificial sequence
  Reagent probe or primer
tcagggccatcttcttgtgt

SEQ ID NO: 754 - DNA, 23 bp, Artificial sequence
  Reagent probe or primer
tttggtgttttcttatgcacctt

SEQ ID NO: 755 - DNA, 17 bp, Artificial sequence
  Reagent probe or primer
acatcacactattcagc

SEQ ID NO: 756 - DNA, 17 bp, Artificial sequence
  Reagent probe or primer
acatcacagtattcagc

SEQ ID NO: 757 - DNA, 34 bp, Artificial sequence
  Reagent probe or primer
tggaaaagtaccagagactttactgtatatctca

SEQ ID NO: 758 - DNA, 24 bp, Artificial sequence
  Reagent probe or primer
caaaattccattcccacgattctc

SEQ ID NO: 759 - DNA, 16 bp, Artificial sequence
  Reagent probe or primer
aacatcagcagcaagt

SEQ ID NO: 760 - DNA, 16 bp, Artificial sequence
  Reagent probe or primer
aacatctgcagcaagt

SEQ ID NO: 761 - DNA, 24 bp, Artificial sequence
  Reagent probe or primer
ctggccgagaatcatgttttacct

SEQ ID NO: 762 - DNA, 29 bp, Artificial sequence
  Reagent probe or primer
acacgacatttgaaagggactaatgatat

SEQ ID NO: 763 - DNA, 19 bp, Artificial sequence
  Reagent probe or primer
atgatcaaatgcttctaga

SEQ ID NO: 764 - DNA, 20 bp, Artificial sequence
  Reagent probe or primer
atgatcaaatgcttgtagaa

SEQ ID NO: 765 - DNA, 20 bp, Artificial sequence
  Reagent probe or primer
gacgaaccgatagaggcaga

SEQ ID NO: 766 - DNA, 18 bp, Artificial sequence
  Reagent probe or primer
acaggagggtgccatgaa

SEQ ID NO: 767 - DNA, 19 bp, Artificial sequence
  Reagent probe or primer
caataaacaacatgattgc

SEQ ID NO: 768 - DNA, 18 bp, Artificial sequence
  Reagent probe or primer
caataaccaacatgattg

SEQ ID NO: 769 - DNA, 29 bp, Artificial sequence
  Reagent probe or primer
ttcaaccgttcttgttcttttactcaaac

SEQ ID NO: 770 - DNA, 28 bp, Artificial sequence
  Reagent probe or primer
tggtgtcagccaaattactcatcatatg

SEQ ID NO: 771 - DNA, 15 bp, Artificial sequence
  Reagent probe or primer
acaggcatacccttg

SEQ ID NO: 772 - DNA, 14 bp, Artificial sequence
  Reagent probe or primer
acaggcacaccctt

SEQ ID NO: 773 - DNA, 21 bp, Artificial sequence
  Reagent probe or primer
ttaaaggtaaattgcgctgct

SEQ ID NO: 774 - DNA, 27 bp, Artificial sequence
  Reagent probe or primer
tgtagaaattggtattggacatgtast

SEQ ID NO: 775 - DNA, 14 bp, Artificial sequence
  Reagent probe or primer
caccaccattaatc

SEQ ID NO: 776 - DNA, 14 bp, Artificial sequence
  Reagent probe or primer
ccaccatcaatcaa

SEQ ID NO: 777 - DNA, 26 bp, Artificial sequence
  Reagent probe or primer
gggtattgatttgacttggacctgaa

SEQ ID NO: 778 - DNA, 30 bp, Artificial sequence
  Reagent probe or primer
ctcataaatagtttcaatctgtgccgtgta

SEQ ID NO: 779 - DNA, 18 bp, Artificial sequence
  Reagent probe or primer
ttatttgcctattagctg

SEQ ID NO: 780 - DNA, 16 bp, Artificial sequence
  Reagent probe or primer
atttgcctataagctg

SEQ ID NO: 781 - DNA, 20 bp, Artificial sequence
  Reagent probe or primer
caktaaccccaccccttttt

SEQ ID NO: 782 - DNA, 19 bp, Artificial sequence
  Reagent probe or primer
atgccgctttatgatgcaa

SEQ ID NO: 783 - DNA, 18 bp, Artificial sequence
  Reagent probe or primer
attctggttcttcacttg

SEQ ID NO: 784 - DNA, 17 bp, Artificial sequence
  Reagent probe or primer
attctggtccttcactt

SEQ ID NO: 785 - DNA, 20 bp, Artificial sequence
  Reagent probe or primer
tccgaaataaggcacctgtt

SEQ ID NO: 786 - DNA, 20 bp, Artificial sequence
  Reagent probe or primer
ttgcgtgagtttgggtatga

SEQ ID NO: 787 - protein, 776 aa, Glycine max
MSGVGIDIGNENCVIAAVKQRVIDVLLNDESKRETPGVVCFGEKQRFIGSAGAVSAMMHPKSTISQVKRLIGRRFTDPDVQNDLKLLPVETSEGPDGGILIRLKYLKEIHAFTPVQIVAMLFAHLKTIAEKDFGTAVSDCVIGVPSYFTNLQRQAYLDAAAIVGLKPLRLIHDCTATGLSYGVYKTDIPNAAHIYVAFVDIGHCDTQVSIAAFQAGQMKILSHAFDSSLGGRDFDEVLFSHFAARFKEQYSIDVYSNGRACRRLRVACEKLKKVLSANAVADLSIECLMDEKDVKGFIKREEFENLASGLLEKFNIPCNKALADAGMTVEKINSVELVGSGSRIPAITNLLTSLFKRELSRTLNASECVARGCALQCAMLSPIFRVKEYEVQDSIPFSIGLSCDGSPICEGSDGVLFPKGQPIPSVKILTFQCSNLLHLEAFYANPDELPPGTSPKISCFTIDPFHGSHGSKARIKVRVQLNLHGIISIESATVRNLNFISSYCIISFLRDLSMHMVIFVFQLMEDHVDDSVTTGDYHSNSEAMNADGTKKDKANRRLHVPVSENIYGGMTKAEILEAQEKELQLADQDRTIELTKDRKNSLESYIYETRSKLFSTYLSFSSEHERKDISRSLKATEDWLYDDGDDETVDAYSAKLEDLKQLVDPIEFRYKDTEARPQATRDLLSCIVEYRMSADSLPPQDKEQIINECNKAEQWLREMRQQQDLYPKNFDPVLLSSDIKSKTEDLNSVCQQILKSKGSPFPKDKGEDKQNTSNHQ

SEQ ID NO: 788 - protein, 743 aa, Glycine max
MRRPKSKEFRKQQRVSEEEEINLLNSWIQFQPPDSGSNPMSLPRLPKNSPVGRLEDNTYSRYAGASRFDQFPLSKKTKDALRESKFVAMTDIQRASLPHALCGRDILGAAKTGSGKTLAFIIPVLEKLYRERWGPEDGVGSIIISPTRELAGQLFDVLKVVGKHHNFSAGLLIGGRKDVDMEKERVNELNILICTPGRLLQHMDETPNFDCSQMQVLVLDEADRILDSGFKKELNAIISQLPKRRQTLLFSATQTKSIQDLARLSLKDPEYLSVHEESVTSTPTLLKQIVMIVPLEQKLDMLWSFIKTHLQSKTLVFLSSCKQVKFVFEAFKKLHPGIPLKCLHGRMKQERRMAIYSEFCEKRSVLFSTDVAARGLDFNKAVDWVVQVDCPENVASYIHRVGRTARYKSDGKSVLFLLPSEIQMLEKLKAAKVPVHFNKPRQELLQPVSSLLASLLAKYPDMQHRAQRAFITYLRSIHIQKDKDIFDVMKLPINEYSASLGLPMTPKIRFLNPKINSKDVSKSILVEPEDSDKETIFEVSRKLDTAAFKDEETENDILQLADTANEGEVKSSEIEEIIPATRVLKKKKLKINVHRPLGTRVVFDDEGHTLPPLARIADTQSGKEMLLDPEKKAEYYRRMRDDLKKADNEDKLIERQRLREKRIKQKMKWKAGNAEEDDQDDISGSEVDETVDRWHKKSKVYFDSDSDEGERNDVTGNAGITTGAVTLEEQEALALKLLNSMHS

SEQ ID NO: 789 - protein, 1804 aa, Glycine max
MASSIASQLEVIRSFAKTDSDPLKRPLTRPSILYDPKKAADISTEAIFTEALRGLEILIGMDERFRNYKNDLFSHRSTELDRELMGIEQNNQLNVSIASYLKLLSGYFLHTAALQTLEYLIRRHKIHVYNNEDLMLCALPYHDEPEFVRIVQILDTRNTKWGFLDGVKASGARLPRMVIVQQCIRDKGILDALCNYASPTKKSGPSVPAIRFCTAVFVEVLGTVVTVDDGLVKRILPFVSLQPGIKEVSDHKAGSLMIIGLLGNKTALAPKLLNSLIRLVAEVARQEATELTDLHWFRLSLITLISLVQSQNVEILPLKALEILKEISSSDEYCQRTLLSLIEKVPINGLVYHVVTKILSTCVKLSQKVSDSTSSMSARWAKKILFVFNTKYPSELRDATHHFLQDNKARSKKDDSLYKVLCKMLDGNMDSSLNISDSNIWLGLYHPKADVRCATLLDLNNSIILKTKAVASENLINIQEDILRQLDDKDLTVVQAALHVDGLPNVIDSSKLLDALQNVLKRCTDKLLSGSADNYSLNGEVAVTCLKNAISYFSDHADYLKNVAAMIFPLLLVLPQTQSLNLKALGLVNKINWPLYQNIVVSSFGKGKFNSVAQQGNTCSVGFLKRYFWFHHISKLLIMTLEVKLQTLIPGSLSSINLKTIDNMAKNFMVHPKEHIACISYTSPSYEDICALFECTIRVAAMNCIDSLRTLWCHVERSGKKNAENIHIVRQEISSFIVCICFELILSKHLRASKYLVEFKLLFCVIEIDCRDRIGLGIFCCYWFDQPTKIKILGFILGSTLKFSNYGKLMILSLFKGIGNALMHVPEVGPLLSSLLEQYYDELKKSCPKLSNTETQIMCLLLESCIMSSPSDVCFIYVLFCYFEFTDFILGTFQLGSMTLDDPACVKPCITVLNKLNNQFYMELKNEISFSTVGHMLDLILAQKSCISSSAEEKMAKKQKFIGHQEAGYPPNDICRRVNPVYILSSLLDVLLLKKDITNRHLLLGPLFKLLSKVFSEEWVNGAFSPVIRLSQPSSPSEANNYTVYHIQQTLLIILEDIIISLKSMAPLNEKMINEINIKLLIECARNSTGSVTCNHVFSVLSAVTRVFAGEVLEHMLDILEVIGQAAVTQIDSHSKHVFEDLISAIVPCWLAQTDDVEKLLKIFMDILPEIVEHRRLSFVLYLLRKQIESKVTFLQLKKTDNRSASKRPKFLIEKKALGLLCEASRNHKNVSLKLKDNKGSRSTPSFLLLHMNETSQESLNKLCLEIMRVLDDSSNTSLKVAAVSALEVLAERFPSNNSIFSLCLGSVTRHIASHNLAVTSSCLKTTAALINVLGPKSLAELPKIMDNVMKSSRRVLADMKPETIDVLSASNESHFYVLITLEAVVDKLGGFLNPYLTNIMELLVLYPEYVSGVDVKVESRAHGIRKLLAEKIPVRLALPPLLKLYPASIEAGDKSLTIVFDMLGTIIGTMDRSSIVAFHGKIFDLCLVALDLRRQSPPSVQNIDVVEKGVLNAMTVLTLKLTESMFKPLLIKSIEWAESEVDETASSGSIDRAISFYGMVNKLTESHRSLFVPYFKHLLGSCVHHLSDGGDVKVSRVNRKKKARILDDGNIKEIGSVSIKGWHLRALVLSSLHKCFLYDTGTLKFLDCSNFQASYALIGNFSIPFKNSLYMLLRPIVSQLVVDPPVLLNDSMNILSVKEVDDLLVVCIGQMAVTAGSDLLWKPLNHEVLMQTRSEKLRAKILGLRIVKYFVENLKEEYLVFIAETIPFLGELLEDVELSVKSLAQEILQEMESLSGESLRQYL

SEQ ID NO: 790 - protein, 342 aa, Glycine max
GQSKRPICPSCSKPSRTCLCSRILTPGLQNSVHVTILQHSLERKHPLNSTRIAILGLKNLTVATVSDVNFEARFLIRLLDPNYHSGHAGNEPTALFSHSNLIDTDSAGKCGLRNDVGDVLDSASNAEVVKQVSISDESGELAVTVTIGKYGAISSLSHIWMTQAQCQSPELSFDNILAYPEACEALSKGFLVKKFQRKQLNRDEELEECEEFELEVRPGSVLLFPSEMAVDVSDLDAIGFEVKNLIVLDGTWAKAKRIYSENPWLNILPHVKLEVNKTSLYSDVRHQPKAGYLSTIESIVFALKAVGELNHEGLEGLLDTFESMVGDQRRCKEERLSKHFSC

SEQ ID NO: 791 - protein, 525 aa, Glycine max
MAKMKIAWLLLLLLVSVCVTASQVWALKSPFHPRDVLPLLPRQLSWPILNRLHSAVDLLPVFVGAAFSPVDNLKWKGACFYENKAWMVFHNKSGTQYGGGTLHIKVSNAHSWTCMDLYIFASPYRVTWDYYFLAREHTLEIKEWEGKAEYEYVKNHGLSIFLLQAGMLGTLEALWEVFPLFTNTGWGENSNIKFLEKHMGASFEVRPQPFVTNVSVDDIHSGDFLAVSKIRGRWGAFETLEKWVSGAYAGHTAVCLRDSSGKLWVGESGHENEKGEDIIAVIPWEEWWDFELNKDDSNPHIALLPLHPDLRARFNETAAWEYALSMAGKPYGYHNMIFSWIDTLNGNYPPPLDANVVACVMTIWSQLQPEYAANMWNEALNKRLGTKGLDLPEVLVEVEKRGSSFDELLTIPEQDYWTYSDGKSTSCIAFILEMYKEAGLFDPISSSVQVTEFTIKDAYILNFFENNSSRLPKWCNDGDTVKLPYCQIKGKYRMELPGYNTMQPYPHMNEKCPSLPPKYSRAQNC

SEQ ID NO: 792 - protein, 69 aa, Glycine max
MEVRLSAIKALLSNCNMLESLSFKRCWNSDKFDLGEEKHMGLTQLVLDQCGFDFDYFKVNAPNLKIFKY

SEQ ID NO: 793 - protein, 229 aa, Glycine max
MRVAEEEKAVLEQVFGSSSSEECDSDGYSESESEWEPISEVNGLWLCPHFLSPRRQSHILSSIQADNWFPSPSINQAMRFGLQHLPSWATPLAHSIRRSVQAQAQAQTHPPPFPLHLLHREPLFDQMIANVYQPGEGICAHVDLLRFDDGIAILSLESSCVMHFTPLSGSLSVPVLLTPGSLILMSGEARYRWKHEINRAPEFQIWRAQPLTQSKRTSITLRKLCPSSP

SEQ ID NO: 794 - protein, 296 aa, Glycine max
MAFNHLRNLNRISIHRILHHRFQPLLNATTRFFIDAAASSMSQPQPKQQPSAPSSSLKHNELAKFAAIADTWWDSEGPFKPLHVMNPTRLAFIRSALCRHFKKDPYSAKPLEGLKIVDVGCGGGILSEPLARLGATVTGVDAVEKNIKIAQLHAGLDPATSSIEFCCTTAEKLVEEGRTFDAVMALEVIEHVADPAEFCKSLSALTVPDGATVISTINRSMRAYTTAIVAAEYILRWLPRGTHQWSSFLTPEELVLILQRAGINVEEMAGIMYNPVTGGWSLSDDISVNFIAFGTK

SEQ ID NO: 795 - protein, 138 aa, Glycine max
MHGDKAGVVNALEDDVEGHVDLSILTTKLFWCDIDVAIGHHDDADDLVALKDIDKVVVVYDNDVDNVLFLGTEKTWNGSIVKRVKGTSCVRGVFLPLCFPLHSRILLTHLIEDQIQVHLIVEIISCLLILADEEVGGD

SEQ ID NO: 796 - protein, 106 aa, Glycine max
MMTYRDINVTPKKLSCKYTEIYMALNIVLQSVNNTCLVTMLATMDNESIAKMFQVNKNSEDLTVGPTYHNILKATCWTRYMVVFGWWPLFLFDFFLCVDGERQLYK

SEQ ID NO: 797 - protein, 256 aa, Glycine max
MEFPNEAIPEGCSQKKTGRGKIEIKRIENTTNRQVTFCKRRNGLLKKAYELSVLCDAEVALVVFSSRGRLYEYANNSVRGTIDRYKKACAASTNPESVSEANTQFYQQEASKLKRQIRDIQNLNRHILGEALSSLSLKELKNLESRLEKGLSRVRSRKHETLFADIEFMQKREIELQNHNNFLRAKIAEHEKAQQRQQDMIPGNVCESTIPPQSYDRNFFPVNLIDSNNQYSNQDQTALQLVLSSGVGSLTSSYVS

SEQ ID NO: 798 - protein, 266 aa, Glycine max
MLLKCLAAISSSYTTTSNSLLVFASSSLSSPAKTKFLPSLSRFSVKRLCFLSQTRPHISVNKPSMNLLNRLGFGSARAPENMDSSIPQGPDDDIPAPGQQFAEFGAGCFWGVELAFQRVPGVTKTEVGYTQGLVHNPTYEDVCTGTTNHSEVVRVQYDPKICSYETLLDVFWARHDPTTLNRQGNDVGTQYRSGIYYYTPEQEKAAKESLEQQQKQLNRKIVTEILPAKKFYRAEEYHQQYLEKGGRSGFKQSASKGCNDPIRCYG

SEQ ID NO: 799 - protein, 399 aa, Glycine max
MFPKLTTSPLRRFQLIDSDSDDADVGVGAGTSDANKVNPNSHLEQEKKTSADENRNEDLWKDFSPVKNVSVNRFQLLSDSDDSDVDVGGGANKANPNRHLEQNKKTSPDDDLWKDFLPVKNVSVPTPAFNEICEEYFRSANCKEVGGDASKSFSERNPGVSSSCQRYQQRWESTDPVHPAHSYFFHEDPRIQQLVRSRLRNFNPLGTINTVNQQPNFSHIDYMGQFGNGGASNMQGVQNGFINCSTRGGNKSSNLNVDGSFNASGGWVDPKIVSPFSHGESSRKKATKRNGSKNSVSKSNSKANKSNPANQSCASGGWVEPRSCTSLPKDAGKRRVQASGESAGHWFTSPEGRKVYVNKSGEELTGRNAYRQYRKESGAGFKKSRKKKGAKTTNAKKRN
